United States Patent Application Publication US 2022/0211063 A1 - sequence listing, part 13

SEQ ID NO: 11 - DNA, 2041749 bp, Penicillium roqueforti
  misc_feature (6318)..(9203): n is a, c, g, or t
  misc_feature (163146)..(163250): n is a, c, g, or t
  misc_feature (224982)..(225352): n is a, c, g, or t
  misc_feature (232854)..(233750): n is a, c, g, or t
  misc_feature (335830)..(335958): n is a, c, g, or t
  misc_feature (386281)..(386450): n is a, c, g, or t
  misc_feature (488178)..(488378): n is a, c, g, or t
  misc_feature (690785)..(690951): n is a, c, g, or t
  misc_feature (738140)..(738259): n is a, c, g, or t
  misc_feature (751835)..(752297): n is a, c, g, or t
  misc_feature (756601)..(760136): n is a, c, g, or t
  misc_feature (768790)..(770287): n is a, c, g, or t
  misc_feature (809009)..(809035): n is a, c, g, or t
  misc_feature (904524)..(904758): n is a, c, g, or t
  misc_feature (906292)..(908779): n is a, c, g, or t
  misc_feature (912679)..(914742): n is a, c, g, or t
  misc_feature (922665)..(925395): n is a, c, g, or t
  misc_feature (1111941)..(1111960): n is a, c, g, or t
  misc_feature (1118138)..(1118269): n is a, c, g, or t
  misc_feature (1133263)..(1133375): n is a, c, g, or t
  misc_feature (1318570)..(1318570): n is a, c, g, or t
  misc_feature (1379908)..(1380559): n is a, c, g, or t
  misc_feature (1647019)..(1647165): n is a, c, g, or t
  misc_feature (1895332)..(1895351): n is a, c, g, or t
  misc_feature (1895894)..(1896110): n is a, c, g, or t
tatatcttttaaattaagttatataaagatctttatattaaatagttaatctatagtcttactaattaatagtaaggaatattagttcttaagatttaatatattaagtccctaataatctatatatagatataattttctatccttttttaatataaataaaataggtatatctattaagctttataataacttaatttagcctttcttaatatattctttaatataatcttaaaatactataagttttatcttaaaaagagagtaaattaatttataaggaatttatttacctacttttattttaataatataattatatttattactttctaataagttctctatttttttaaaattaaagatattagtctaatctatatattagataggtaaagctttctttataccttatattataataaagagtaggataggcttaccttttataattaaatagggatatattataagtataagggccttatagagaatctcttatataaaggctattatagttatccttttaatctttttattaaataagtaataatactatacctagtttttttagttaatattaggattaatagcttctaattaattaaatctaataattaggttatatcctattatcttaactactttataagagagtatatattaatatactatatctctactattttatagtttactatttagcttataggaattataggaatagactatagagctatctatagctataatagattttagggagcctatatctatatatagaaggtactatttaacctagttctaatttataaaggtctttttaactctactatctattagtatctatataatatatttagtaaataagctatacatataactgagctatataccctaaccaacctactggaatttaaatgtatttattttaaccataatactattaaatttattaaactaaaaagaatcatttatctagatatctattgatcttatgccctatctttctatacctactataccttagtatagcctatagatatggttttaaccccaattaagtacttctactaacctagtaattattttagaagcttcttagactaaaagaccctctatagtaggtatttactatctagattaggtctatttttacttcttcttcttatttttagtatataaattacttatttctttcttaagaagtatagtagattatatagttatttaataggcttttaaaacctagttaattactaaatttagtaagcttagagggctttttaatcttatctaaagtaatactttaatagataaagcctacttttatataaagactataaaactattaagtattaaaagttaatatcttcctattatatataaaaaaatcgatagtataaagagtttctaaagttaataaagcttaattttattagatatctaattatttagattaactttgaattattaattactaaaaaggctattaaactaagatttaataaagactttacctttaaaaataatatatagagaaaggacctaccctattatatttatatatttaatagtagttatctactattaaataatagtttttttaaataagattaaactatttactaattacttttaagtctttatattttatatacttataattataatatcttaagaattaagataagaggttagggtactatttaataaagttataaacctatttcttactaactaaaataactaggatagttttatattattaaagaagaatattagctatttcttatataaaagaatattagggggatattttatataaatctatagaaagtatctatttctaaagagattcctctttaattatagttaatttagaagaattagtatataaagttatatattattaaatactatataagtatatatagagtatagatttaggtatattaaagatatatactatcctataaatagatatagtcttttctttcttaaaagcctagatagctaataagatcctatcctcctactctattaattttataggtaattaggggtattttagtggtatagtaggcagttaaattaactaagtactaatttatagacgcgttttagttagggtatatagctcggttatatatatagcttacttaccgaatatattagtttattctttattattaattttaatactaactttataaataaaagtaagttttaacttatacttaatattattaagtcctaatactactaatactataaatattaaggtaattagttttttaattataaattccctttagtctctttatagatatttatatagtaacctagctttctatacttaaagtagttattatagaggatactattaggatttattttttatttattatatttatatttattattagatttattatcctacttatccttacctttacttttaaacctatctttatatttctttatctttaatataaataaagtataagagttaagactaatatctaggcttagatctaatttagtagtattatttttactattactaatacttttctctttctatatataaagtaatttctattagttagagatttaactttctattataaaaagatatctaatatatattttatatatttctaactctatatactattttaataacttagtataaactatattaattactttagcctaaaggtattctttctaatactattaattatataggtactttagatagtaatagatagtattaaactatattataaatatctatatagattaatattatttctattataaaatactatattctaatatattatttttatagatattttaaggattatttataagatatagatagaagtcctagaagttttattaaatagtaaattctttaaatatctttatataagactactaattatttaattatagtctttaccttatataaactaaaattatactattactaatatttattaaaatataattaaaattagttaataaaggtatagtattattaagttatatttctataaaatagtttaatatttatagattctcttaatatataaatataatatcttttaataacctatagtataatatagttatttatatttattaaaataagagactttatttactttaagatttctaattctataaagaggttttagtattccttccttatcttagtttctttaatatatttcctaagttaattaagggttaataagaaaagatttataagatattatactaatattaggtctaatagtatagtagtttcctatattaattctaaggtatctataaaaagatagtttataatagaaagaaggatttaattaattaaagcctatttattaggctataatattatagggagtccctataactatatattataagggtttaatataatataaactaatataaataaagggtagtctctattaggtaatctaagtatttaaaagctattagaactataagacccctaggtatacaatacctaagggaatactatgtataggtttatatatattcctctcttatacagacctttatctattatacctaatacttgactacctagctatttacctatttaaatactaggcatttgaccccttaagagtatattataaagtattgtgcctagttctaccatactctaataatatatgataataaagatattccttcccgagcctatataggtttatatatatttccctcttgtatagactttatctgttacagccccctcgagactggtaagaattggtcttagtatattatcaatatatcatgttccctctataaagccctttatgtattacctagttaggtcttatacctataaagtttatactagtgtgaaaatgagtgagacagaacttttgaaacttctagttaataccttatccctgctcttccatttcccttattttatataagcataaatcatggcaagtgacaaccagtggttccatagctcagttggttagagcgctgtgctaataacgcagatgtcgagggttcgaccccctctgggaccattcttttttgttttttgtttttcgataaatcttatcagaatgtgatagttatggctcatttaagccttaaacaggaacattggtttttgttatagtctagtggaaaatatgctgcacgattttccgtcaaatcctcttctatcagtatccatcaatcgtctttggactttgatcgatcttcccatcttctatcagcttcacctctcactttttcaaattcaacccaatggccaagcattacacgatagctcgaagctctctgttctgtactagacgtgcagcaatcaaaagcaagccacctagtagcaaggatacccctgaaaatattgacagggaaaggtacccgtacttctcgagcagagcaccactgatgggcacatttgccatagcgctgcagttccagtcagcatactacattatcatttcaagatatgggggtcatacgatagagctgtggcacccgacacagtcccaattgccaagccaagagtggtagaagtagcaacctgggcggcacaagcttgctggagggataaaatgccctacaaatctagtcagcattcgaagtttataccattcgaggataactcactccagacgcaaagccataggcagcggaccaaattaccagaccggccacagatgtgactttagtccagcacaatgcaacaacccctgcggatatagttgctatgatgcaacagttgaattttccgtacttgtcggcaacgatgccagggaggactcgaccgaagaatgaagccccattcacaatggaaacagtatagaatgccagagatgtcgagaatcctttctcaaccgcgtaggaagtcgtgtagaaaaacggcgagaacatgccaaagtatgtaatgaacatggcgaggcacagtagctgcagcgacggttttcgaaaaagggccatcgcttctgccttgtgactctgcggcttatccttttgctccgcggtatcttcgtcacttttctggtttgaatcacgactctccaaattgattgcaggcgtattcggagatttggcgactgcacaagagaagataaagcaaggaatcatgataaatccgacgattcgcatggtccagggaaacccaatcttgggcttattgatcagtctgtcgattgcaacgggccagataactccgccgagcgatgaacccgcaagcacaatccccatcgcggcagcacgcttcacttttatatattgtccgaccagtgcgagcatcggccatgtcaccatagccatggagacacctaacagaataccctgagcgaggaggaattgatagaactcctggcatagtgaagtcatcataattgcaaaaacacacccgaatgaaccaacatataccatgaactgttcaaaggaagtatgagttttatttctcgacgattcaggaagagtatgcttaccgttggtccaaagatatcaagcattgctcccgccacgacagatatagcaaacaaaaagaatattgacacagctccgatccatgcgatggtagatgtcgaggttgaggatagctggttttttgtgtagtactcttggaagataccgaacgagttcataaaccccacggtgcaaaaggtacaagtgaaggcgcctaatataactagccatgctcggggcctagaagaggttagtgcactggtcggctacatatcttgtagcttgaagtatatttcacttacgtgtattcagttggaggactatcctttggtgacattttggcagaaatgaaatggctctagttaaaagcaagatgactacggaataccatgacctttataagaaatctgactccttaattacatctgaaaatcactctcggagtctccgggctactgtctagatgccccggaggaagaattgacagatatggtttagcgtctcggagaatccgcggagtctccgggccaacacttcaagctgtctcctatgcgaaaaacgcgctgtttctttgctttcgctgggtcactattattaaactgttttcggggagattgaaaacatgaaacgaagacaagtttctggagtcgtcaccccaggcccgaaaagacagtctcgacaagaccccgtttcctgcgagtcctgtcgaaagaagaagctgaagtgcgacagagagcttccctgtagtagctgttcttcgcgtaaactggagtgcagctatggcagctacgcctcgggggcaacccctgtgcgacnnnnnnnnnnnnnnnnnnnnnnnnnnnnnnnnnnnnnnnnnnnnnnnnnnnnnnnnnnnnnnnnnnnnnnnnnnnnnnnnnnnnnnnnnnnnnnnnnnnnnnnnnnnnnnnnnnnnnnnnnnnnnnnnnnnnnnnnnnnnnnnnnnnnnnnnnnnnnnnnnnnnnnnnnnnnnnnnnnnnnnnnnnnnnnnnnnnnnnnnnnnnnnnnnnnnnnnnnnnnnnnnnnnnnnnnnnnnnnnnnnnnnnnnnnnnnnnnnnnnnnnnnnnnnnnnnnnnnnnnnnnnnnnnnnnnnnnnnnnnnnnnnnnnnnnnnnnnnnnnnnnnnnnnnnnnnnnnnnnnnnnnnnnnnnnnnnnnnnnnnnnnnnnnnnnnnnnnnnnnnnnnnnnnnnnnnnnnnnnnnnnnnnnnnnnnnnnnnnnnnnnnnnnnnnnnnnnnnnnnnnnnnnnnnnnnnnnnnnnnnnnnnnnnnnnnnnnnnnnnnnnnnnnnnnnnnnnnnnnnnnnnnnnnnnnnnnnnnnnnnnnnnnnnnnnnnnnnnnnnnnnnnnnnnnnnnnnnnnnnnnnnnnnnnnnnnnnnnnnnnnnnnnnnnnnnnnnnnnnnnnnnnnnnnnnnnnnnnnnnnnnnnnnnnnnnnnnnnnnnnnnnnnnnnnnnnnnnnnnnnnnnnnnnnnnnnnnnnnnnnnnnnnnnnnnnnnnnnnnnnnnnnnnnnnnnnnnnnnnnnnnnnnnnnnnnnnnnnnnnnnnnnnnnnnnnnnnnnnnnnnnnnnnnnnnnnnnnnnnnnnnnnnnnnnnnnnnnnnnnnnnnnnnnnnnnnnnnnnnnnnnnnnnnnnnnnnnnnnnnnnnnnnnnnnnnnnnnnnnnnnnnnnnnnnnnnnnnnnnnnnnnnnnnnnnnnnnnnnnnnnnnnnnnnnnnnnnnnnnnnnnnnnnnnnnnnnnnnnnnnnnnnnnnnnnnnnnnnnnnnnnnnnnnnnnnnnnnnnnnnnnnnnnnnnnnnnnnnnnnnnnnnnnnnnnnnnnnnnnnnnnnnnnnnnnnnnnnnnnnnnnnnnnnnnnnnnnnnnnnnnnnnnnnnnnnnnnnnnnnnnnnnnnnnnnnnnnnnnnnnnnnnnnnnnnnnnnnnnnnnnnnnnnnnnnnnnnnnnnnnnnnnnnnnnnnnnnnnnnnnnnnnnnnnnnnnnnnnnnnnnnnnnnnnnnnnnnnnnnnnnnnnnnnnnnnnnnnnnnnnnnnnnnnnnnnnnnnnnnnnnnnnnnnnnnnnnnnnnnnnnnnnnnnnnnnnnnnnnnnnnnnnnnnnnnnnnnnnnnnnnnnnnnnnnnnnnnnnnnnnnnnnnnnnnnnnnnnnnnnnnnnnnnnnnnnnnnnnnnnnnnnnnnnnnnnnnnnnnnnnnnnnnnnnnnnnnnnnnnnnnnnnnnnnnnnnnnnnnnnnnnnnnnnnnnnnnnnnnnnnnnnnnnnnnnnnnnnnnnnnnnnnnnnnnnnnnnnnnnnnnnnnnnnnnnnnnnnnnnnnnnnnnnnnnnnnnnnnnnnnnnnnnnnnnnnnnnnnnnnnnnnnnnnnnnnnnnnnnnnnnnnnnnnnnnnnnnnnnnnnnnnnnnnnnnnnnnnnnnnnnnnnnnnnnnnnnnnnnnnnnnnnnnnnnnnnnnnnnnnnnnnnnnnnnnnnnnnnnnnnnnnnnnnnnnnnnnnnnnnnnnnnnnnnnnnnnnnnnnnnnnnnnnnnnnnnnnnnnnnnnnnnnnnnnnnnnnnnnnnnnnnnnnnnnnnnnnnnnnnnnnnnnnnnnnnnnnnnnnnnnnnnnnnnnnnnnnnnnnnnnnnnnnnnnnnnnnnnnnnnnnnnnnnnnnnnnnnnnnnnnnnnnnnnnnnnnnnnnnnnnnnnnnnnnnnnnnnnnnnnnnnnnnnnnnnnnnnnnnnnnnnnnnnnnnnnnnnnnnnnnnnnnnnnnnnnnnnnnnnnnnnnnnnnnnnnnnnnnnnnnnnnnnnnnnnnnnnnnnnnnnnnnnnnnnnnnnnnnnnnnnnnnnnnnnnnnnnnnnnnnnnnnnnnnnnnnnnnnnnnnnnnnnnnnnnnnnnnnnnnnnnnnnnnnnnnnnnnnnnnnnnnnnnnnnnnnnnnnnnnnnnnnnnnnnnnnnnnnnnnnnnnnnnnnnnnnnnnnnnnnnnnnnnnnnnnnnnnnnnnnnnnnnnnnnnnnnnnnnnnnnnnnnnnnnnnnnnnnnnnnnnnnnnnnnnnnnnnnnnnnnnnnnnnnnnnnnnnnnnnnnnnnnnnnnnnnnnnnnnnnnnnnnnnnnnnnnnnnnnnnnnnnnnnnnnnnnnnnnnnnnnnnnnnnnnnnnnnnnnnnnnnnnnnnnnnnnnnnnnnnnnnnnnnnnnnnnnnnnnnnnnnnnnnnnnnnnnnnnnnnnnnnnnnnnnnnnnnnnnnnnnnnnnnnnnnnnnnnnnnnnnnnnnnnnnnnnnnnnnnnnnnnnnnnnnnnnnnnnnnnnnnnnnnnnnnnnnnnnnnnnnnnnnnnnnnnnnnnnnnnnnnnnnnnnnnnnnnnnnnnnnnnnnnnnnnnnnnnnnnnnnnnnnnnnnnnnnnnnnnnnnnnnnnnnnnnnnnnnnnnnnnnnnnnnnnnnnnnnnnnnnnnnnnnnnnnnnnnnnnnnnnnnnnnnnnnnnnnnnnnnnnnnnnnnnnnnnnnnnnnnnnnnnnnnnnnnnnnnnnnnnnnnnnnnnnnnnnnnnnnnnnnnnnnnnnnnnnnnnnnnnnnnnnnnnnnnnnnnnnnnnnnnnnnnnnnnnnnnnnnnnnnnnnnnnnnnnnnnnnnnnnnnnnnnnnnnnnnnnnnnnnnnnnnnnnnnnnnnnnnnnnnnnnnnnnnnnnnnnnnnnnnnnnnnnnnnnnnnnnnnnnnnnnnnnnnnnnnnnnnnnnnggttccatagctcagttggttagagcgctgtgctaataacgcagatgtcgagggttcgaccccctctgggaccattttttgctcctcttctatcagtatccgttcccgaccgcctttggactttgatcgatcttattcttcccatgttctatcagcctcatctcttactttcttaatgatgcaaagctcaaatggttaagctattgcagcttcaaaaaccatctgccttcctcttagtaatggtgcagacctctggtagatcctttgatatcgctttttgcggaggatatctattttgatctcgaagagaacgatcttccttcccggacgaatgaagaaactgaagagcagctggagcttcgaaataagattgttagatatctcaagagcaacatgtgggggaaacataatggatatatccagttcggtgataattacgagtacgatgtcttccctattgttctatactagtatctaaacgatagatcccttcgtgagagaaagaatactatccataatactattaacagtatttttccagctatttgagagacactcccctcggccgactgcctatactattgagtgacatttggagtattaccctccatctactcctgtacttatcagacgagattatttgtgtgagccgaacttgttctatggagaacgaagtgtaagtaatagacgaaccccgaaccccatcctcttcaaagtatatatattaattaaagttgtcttattgacatagctcgatggcatttattctggtgaagaccatgttgatcgttattacaaaccacaagtatagggttagcagcaagaggaagatcagtggagatatcatataagaggaagtttctagaaaatactcctcattccttcggatggaagtaggctgcaatgactgcgaagacgattaccatgacgatagaaaaaagctacctgctaaaaaaaaagccagaaaccgagaagtaactagaagagaagctctcggtaaggtatcttggttgtgtctgaaggagtaaagaatgcgactactgtgctgtgttataacctgccttataaaagagccttttaagatactccaggagatacctactaagaagatacttaccagtattctcgagaggataaaataagattttcatgagcgatatgaatccttccttgacagctataaagtgagtacattcggtagaggaaatactataagccgcccttataccaaacacaatctcaactttaacaatcttgagatccggttctgttgggatcgatgagtaagtccaatgctagtatccataagctatggcctaacatctcttagattacgggcaataggtaggtaccccgaggaagaggataacccaggagtctaccttcatatcttataaacctaacagagaaagttttggttgtatattagccaatctattaagctaatagaccggatttacaagcactgtgataaggtatactgtaggctaaatccatcactttattacagcgtgtgggattccagctcttatgcttcggacgccttaaagcttaaccaatggccgagcggatagcttttctctatgttaggtgataaattttcgttttccctattgcaaaatccttgcagctttcctggcaggtcgaagattaagttttttttttttaaccattgctttcgaagacccccaggtctttcctttagcgcgtcaggtgtgtagtatatatcctgctagtaggttagttattgccgtggaagctgtcaaaaagggtggagatgattgggtctggccttttactcatggaaagagggcatttctcagtatgaacagcctttgacgaatttcaaacacctatgctaaatccgaaaaaaaagaaaacgatgtaaatataaccccagttagttataggggaaacctatatagatgctaccccccttggtctatccttggccggatctgtctactctatagcccgatgcgacacaacccgttggtccgctagcacaatggcagtaatggatgatgtaggattctacctgaatatatagataagaacaatattccgaaagctttaagtaccttattccagggatccagggaggtatatatcagcacaaagtctaagtttgatgggggtagtccattcgcaaacggtcagaacccaaagaaccaatcagataaaagaatatgaatcctagctaatgagactactccaaacagactgtaaaatctgcagaacccgagttgatggattattttatttgagatagctgaatgttctgcatctgtacgtagatggtgcttgaggccgtagtggtgatataaatctcacccccgcacgctatctctctctagcttattgtctatttcgattcgcacaatcatgcagcactggctgaattatgtaaaagttgcctgttgtgctatgtaatcggttccatagctcagttggttagagcgctgtgctaataacgcagatgtcgagggttcgaccccctctgggaccattttttttttcggacagaaaatcgcgataatgcgaatgtattggtcgatttcttacagcagaaatatctctacatggtccgaaatgtataatctggtacggaggtccatttcaaaagttctgtctcaaccttttcttggcttttttaaataatacactagcgtgtaatggcatatagctactacagcgggacctctgatatattagaccagccaaggtacctaaatagaccgccttcctaccaaatattctgctgacgagttttgaactagtagaactggcagaattaagaggaagttttttttaggtacatttcttaagccgaatatttcggaggtcctaccatatatactataacgaggggttcgatatcaagaactagggctaaggcctaagagaaagtatgggatgaattgccttagatgtatattccggcttagattgtaatgatacccttctatattaagagttgctttagaaggtgtaaggtagttggtttgttcaactatataatgtatgttgtatttaatcaaattagaacgagataacagcaatttaaaacagccttactatattaggactaagttcatactagcgtgaaaatgaatgagacagaacttttgaaatggacctccgtacagagtacagagtagttaaccagttaacttcgttaggacacaattaataagcaaatgcacagataaaagtcacacgggcggtctgtaaaatgacctgtatagaaatagtatcgatgttggtttctgacattctgaaaattgtgttttagtgcctctgcacccacctcctcaatgatgtaaaaaatgctggctgtattctataatcggttccatagctcagttggttagagcgctgtgctaataacgcagatgtcgagggttcgaccccctctgggaccattcttttttgttttttgtttttcgataaatcttatcagaatgtgatagttatggctcatttaagccttaaacaggaacattggtttttgttatagtctagtggaaaatatgctgcacgattttccgtcaaatcctcttctatcagtatccatcaatcgtctttggactttgatcgatcttcccatcttctatcagcttcacctctcactttttcaaattcaacccaatggccaagcattacacgatagctcgaagctctctgttctgtactagacgtgcagcaatcaaaagcaagccacctagtagcaaggatacccctgaaaatattgacagggaaaggtcatgttttttttccccgatctactgcaaaatgaaccagcacgctgttgaataaacaaaattgaaaagatcaaaagctgagaaattcggttccgaatgaaagtgtaagcggcgcgtagactggtgttctgcttattcgaaaggaaacgatctcgttgagtcttgttgtggttgttgtatagacgacgaagttgatcaagatttgtaggggagcgtgtacattggaattataacggtatcgagttgtggaagaactatgacctaaacttggctggcgatattaaaagaagttgtcgtagtaaaaaccgagctgttgaatttcgaaggctggtcttgcacgaatggcctactttgctgactggctgaccggtacatttctctagatctggaagaaaacctcggaacagtttggcggggtagaagaagaaaaagaaggaggtatagcctgctagagctgctgaatcttgctatacgattattaatcgtggcgggcaagaagctctaaaagctattatattaactagctgtctcccactttgcaacttgcttcttcttcctctccccattttagttattctgaattcaatgcactcttcgtttgaaagacctggcatgtcacactttatacacctttttgttttcgtctgctttgcgttctaagatggatctatctctgtactgccaaaacaaccttctttatacataggagtcattatcaagataccaacgtggaggatagtatccaatcaaccttgaaaatacatttaaagatgaccgttacaagatatatcacaagttagaatggggtggcttttccacggtatagcttacgaaagacagagagtcagtttaccccatacctcatttctagctaatcttatactagccgaaatcaatgggtctccttgaaaatcattaccgtagattcgtcgctactagagctggaacatttggtaaatgtaatggcaaaatttcgaggggagctttcttcaaactatattgttcagctacttgatgccttcgtctacgaaggccctaatgggttataccaatgtcttatatttagcttaattggtcctatagtttatcagatcgtcgcggaacactacaataataacgaaaaactcgagctggaaactacgccctaaatttcgaagtagcttttgaaagctattaaatatattcatagtactattatgtatcatgaaggtcagggtacttcctcctctatagttattttctatagttagctccattttacttacgacttgttagatattagcgatcagaatactatattcagttatactaatttatctaaagagactaaggagcagctttcgatattcttagatccctaaaagttgagccgctaaaacggattgatagtatacctctaagcaataatttgcgggcccaaatagtcgagacagcagactagattagataggtagataaggattagaaaaacattcggatcctcgatttcggagagtttctatcaaggatataaacccctaaagctggcctagctgtgttcattaagggtaccagagacattcttaccgattactttgactattacatcgatttatggcatataggttatatagtatctcaatatatcatttatttaaagaaaatatactcacagcgatactaactatagatttattaattcttattcacaacctggtcattctggtattcccgaattagtttcggagacgacttattaattggtcaaatgattgggtttatagagaagttaccagctgaatagaagcctgagtaggaatcgattaggaagatacctaacgataataagccgaaagaaggtaattgaactgatccatatacagaagtactactaattttgctcgaagattatggaacctcgaagcttgaacagatgtttgctagtttagcacctggtctaacactcaaacctctacttcgtgtgatgcaaggattaacgcgattcttaccgtctactcgccttactgcagaagaggcacttgatttgctaggtgacgcccaagattaatagataaattaagcaaatagatcacacccctttattggaacattatttatttgacataaatgttaacgtagcagattgaagaatagagtaacacgttcataatcaacatctgacccaggggggcctgactttgggacccctctggccggcgcagcaatagcttccaagtcgacctttgtcatgccagggtgcagatggatatcatacgaaagtgtagttccatcgccagatggatgaagacgctgcatacccacgagtgtaacaatttttacttgtcgttgggaagtactagccgccaaatgaagcctgaccgtcagtatactatgcgacggaggaagatggaccgtgatattctgttgagaaacaagcgacgaaggcggtatatctagacagaagtccggttgtaacgacaaagaggcatgtgtaagaacccgaacgttacgaatcaaagccatccttgggtctggctcatagttagctggaagtcctgcaaatcccagtgggagtcaaaccttggcctgatcgcctcagaagcgaatccatgggcgatgaatcaaaatgcggcttgtagggagcacgtgctaacaacgggtcaacaaaggccgggagctgagcaacacttcgccaggcgatagaatgcctcccaagcgtaacatacctgaagcggaagatgaatgccgagtgacattcgaagaggcatcaacagatgcatttgggggattttgcgaagtgaacatcgtcagggcggttgcgttggtcatcgagctcagtaaaccttgcgtgctcatagaactgttctgttgttcctctgagccagatggtgtgtttgtagtgctcgacctagggctgtcaagttgccccccaagagaccatcctcggggagttctactacctgctaatccagctccgggaatatcctgcgtatggccttgggattcgtccttaaatgtgacatctgaagattgcccatcgtttttggatagtgtatcggagctctgcccaggcagtttcaaggttaacctctgcgccattaggggcacagcagtgcccacttttaatctgatgcgagacatctcaggggttccatctacctcacggggattcggaacaagctttttggcttcggcaacgcgtcggtggaagtgattctgggctccaatgttagcctgccgaaggggacggatggtaagagcgtcgcggtatcgtctcacctccaaaacccctgcgagaatagagatatcgctgtcgtcttcattgtattccctagcatttcgccatacatagctgacctcttcttcaaaggactgccacgtaggatatgcggtggttctggatgaattcttcctactgtctgtaccgcgaactctcttttggatgcttcgtaaggacacgggatgttgaataatctcatagtaatcccggtacagattccggtctggtttcccaatgaacgggtaagaaacctcctggccactaattcggggcatcagcttcaagtaaaggaccaaaatcagtgatacctactcagaatccttgagccgggtcaactcggacataatcttgtcctgtgcagcctgaagactgtcaccttcaaaatctccctcggattcgtcctgcgactccggggttcgatctgcttcctctggtggctctaaatccagatgcgacgacgcaagattggactcatcgggaatcatgagatcatcatcctatcacacgcaccgcaacttgaattagcgattgaaacatgtggcccgatttataggcgcaaagcaacgatatagcatagtgaatagagtcgaactgccggagttgtaatgtcgcgattgccctccactcgagtgtcaagggctaatcgatatgtattaatgtaacaaattggatacttacggaaacctttcggcgtttcgttctacgaaacttcatatttggggaagctgcggcagcccgtcgctttgaggtcatgtcttagtcctgataatgtcccgagtcgcgagtcgagtcacacattgaagatagcaatatgtgactgaagaccacaggagaagtggagatacagatttaataaataaagggtcaaaattgattgaacaaattacaagtagtgatagagtatggcaaaagggagatatttagacattcctcatcttagacgtgttgcagacgcgtctacggccccggggtcatcccgccttatgtaagactggtgggccacgagatatcatagtacagaatggtatcatacagtactgtaattaaatttgtatacaaacaactgcaaatctgatgtaccggcttttgcaacggtgtaattttggtaccagctacatacatagtgcatgtgactattttgagtatgatcatgtgaccaaaattggatcgacacctgaggcatcaatagtttctctcccccactattttcccgagtcccgcaaaaacaagtccggtgcttgttgttttgacaactcacatccactcctttctctgtcgcgtcacttttattctcacccgatcattcatcctccgtacctttgattccttaatatcagatcatcttgcacaaccttagggtccctacaagagcactgcgagcgtacgtttttagttgtcgctacatgcgataatcattcagccacattgtgagccgcatcctcaagctatttatttactggccttcttgttggaacaaatcgaattgacgttgacaatctatacagttgagagatccttatactgccatctcttctcatttcactatccaaatggacatcgacccagctaggcgcaacaagaagccccgtctcctcctggagacggagcgcgagaagcttgatgaatttgtggactctattcactactcggcaaggtgaggactctatggcaatgcggtagaccctccattgactctgtatagatacaacgacgacaaatttgaataccgccatgtgcagctcccaaagaatatgctcaaaaagatccccgcagactactttgacagttctaagggcactctgaaattgctttgggaggaggaatggcgagctctgggtattacacaagtatgttgaacataactgaaagatgtgcaggggttctaataatgtgtgcgcagagcttgggatgggagcattacgaggtgcatgaacctgaacctcatatcttattgttcaagtcggttatttgcgaactgttcccttagatgtatcactaaccgtcttgtaggcgccctcttaactaccaaccccctctgcaacaataagtttggcgttatgcttggaaatatgagcagttgagaagacatcgctttatgttcgtgcatggcaggcacatgggttcgcaatattgcctattagcgtccacaaaagcttcatatttgaagttctggaatgacaccaagttccattttctccttgcccgccatttcattgacacgctaaaccaggctatctctcagtctctctattatgtcatacgaaagaccaacatctgtcttgtcatagacacctggactgttctagcatgaccattaaatcgcgtttttggccagtcattctccctactaggctgtgatgaggctgctacggatgatgagcttctccacttcctgaacttgatgtgagaatctagagatatgatctcagtcaagttatcctagattgaagaatgctgtgggagagacatggacctcctctgcttggtatttctagtcgacgctagagggggaaaaaaacagaccgagtatttgcaaagggagcggatatacctggactacccattgatgtcgttggtcatttgttttccagctttaattgagtatttcgctaatggttagcaaatcaagtaacatcaagtaacttcttctctcatctatttccacgctgcctgccactttcgcccgttcgtcgcatgacgtctttgttgcgcatctaatttgtcacgctgaggggacatggcttattgccctagattgtgactggaataaggatcggttgcgctgatcaagtcagcacatggtatagggactatagtggctcggtactaatatagctagatacatatgtatatcgtaaatagctctttggaaacgtcatttcaacccaaggttggtcgactcctagtacattagacataggaagacacagatacagtattaataattcttatagccatccatggctgcttatgcataaatatagaagtagtcgcaaatttgtggtaattctttaagtcactatggaaaacacgtatgtacatcgtattcatacatagggcaaaatgctccacgcacatttcatgaacatcaagggagaccgatattgaggtgaaagttctgggtatataggatcaacttcccaatgcctcctgtctcctcatattcagatccttgagcgtcatttccactgttcgccatccacgcttggctggatcatactcgcctttcacctcgtatcgacaaaacccattaggacccttcaacccaactggacccgtgataaagaaggctccgcggtgagcagaccgtgatgcctgggcctcttcatggtgtaatcgtaatttgaatgcctctgatgccaagtgcaaatccgaccccgggccgaggtctggtaacggtagccgctgtaataaagatatgagtgaggatgggtggtagttagaattctcggtattaggcggcatattttctttgagtccgtcagtcaggggagtttgtagcttagattgatctttctggccaatccagttccttctctcatcggtaggcgcggcagaagaatcatccaacaaatcaacggcatctagcgacttccctgcgggtttcctgaaacgatcaagttgcctcagcaagagcaccagatatgcatctctgattgctaaagcaatatgaactggtttcatgaatgtctgtaacctgtcacctatctcggggtccatcggctttgcgacccacgatatactgtcgttcttgatctccaccctgtctgccgtcagtataagagccaagcttttagagattagcagtacataccccgagcgcacatatccaggaggggcacggtctggaaattgatggacaagccagaatcccgtgagggagagaggctcgccgagtatcggtgacatatgcctccccgcgttatctaaaacgattgtggcgagttcatctaaactcgtaagcgaatgatcttcaacgggttttgaatcgaatccttacccctaagcttctggagcttcttccgatccttagaaaatttcacaaactcttgccactctggatccgatgtagtgtatagctcgccttgctgcaaacgtgaccaggcaagcggaatgaataacgctccctcgttttcgacctctttcccggtgatttcgccgcttccaacggaggttcgacgcggagatgtcttctccgggttggccataggagatagatcagcatcttcggtatcgtcgtcaaatcgtatcagtacgaaggtgctccagaggtagaatgcggtgccgtacaggagacattttgatatgaacgacctgagagattctacgttagtctggctaaagagatcttgatttggcttgaaatgggcatcttacctaatccgaggccgcctaaacctcacatgtcgcacattttgtgggtttaagaagttggaatgagcgtgtgtaggaccgaagagagacgagcgtgcgtgaggacttcgaagcagatacctgagccggagcattgggaaaagccaatccctacaatgattctcactagagtatcatctcaatatgaaaaaataaggaatagatagaatccttgaagcctgatatgcacgaggatttgtgttgcgggtttgctaataatggcaaagggttcggcggtttggtggattatgtaacgtgcggcgttgcggcgtcagggagcctaccatagacgtacactacaatatatgtgtgtagataggtgatgatctctcagaatgaatagtattactaccagaataaactgtaagcttaaaatctatgacatggaccgtagcatatatcgataattggttgagcactcaatatacatactagaccacgtgatagcttagtgatatcttatcggatgccccaaagtcgtccgtagccaaatggtattctgtcctcgactccgtttgtatccaacaaaacgctagataccctcagaggagaatcttggtttgggaatcgccacatttgccaaaatagtcttgtcttacctccggccctcccgattctagcaatatgcgctgggtgtccgccttccttgccctggcattaacaggtgcactgcaagcaaatgcactggatgctacaatcttcacgtttcctcccaagactgcaacctcttcaactgctaatctccaacaacaaacaatatcagaaaatgaggctcagcttgtcttagagcttcgcatgaagtcctctatagcatcggtcctcggaatggtggatgcagacaccgtgaaccgcttgaatcatttcacccaggatgatctcactctctttgggggagccactggggggatttctcttgagaaaagcttctttgttctggaagggatcgaccaggaagttggtaagtggaagcggactcacacttgacttaaaaactttagctaagatactctacagccctagccatgcaaaaagcccagcccaaccatcttcatattcctcagatttcctcaccctttatcgaatttgatctcctggaatcatttatcgaaagcagcctcactgcgaaaggggaccgtgggcaaatctgtacatactacaacgatgctaacagggctgcgtcatcgacatcccaggtagcaaagtcaactttaataatcttggggttccctcgctaatctttcaattataccagactcctaaggaatgcctatccagggaccctatttttgctgatgagtctgatatgcttgtccatgacttccttacactagttgattcagtggaatcctggataagcaaggatcacagttattcagctttgaagttgtcctttaaggtatcgagtttcccctgcctaattagtgaatgatttctgattccacgtcaccaattgcagaatgcctctggtgattctcttctcagaaccaagctcctagagacattgctccttcacttagctagaataccgtcgaccagcaaccaggaaatcacgatattggttctacccgctggtgttgaatcagaaggacttaaccgccgaggcgcgaagcaatcatcggcaccagtcacccatcccttcagaaggtcggcaccgctgcagtcaaccctagcgcctgtctgtcatgcttcgaactcttcgtgtgccgaatcaaccaatgactgttccggacacggttcctgctatctgaaatacggctcgggtgttgagggaactacaggcaattgttatgcatgccaatgcagacaaagtgttgttcagaatagcgatggtaccaccaagacagttcaatggggtggatcggcttgccagaaaagagacattagctcacctttcttcctcgttgcaggcgtcagtctgcttgccatcgttctagttgggagtgcgattgggatgcttttcagtatgggctcacaggagctacccagtgtcatcagcgctggtgtaggaggccctaagtctcagatgtgagcataggggaagctgtgtaggtgttagggtgtgtttttcctcttttctttttttcttggccgagggcttcatgttctttacctcattcatccctcaacctttaagcaaaaaattttgctttactttgtttctaattgccccttccctaccctgcgtctgagggaaactttcggtcaatacagcagtacatatatgtaaggtggcacaatctatttataaggggcacgcggctatagcaaaagaatatattgtatagcatgtacaaaatagtactctctgtatgtattcgagtaatgcgcaccaagagatatatagatatgcataacccattcagcctgctaaatggactaagaatcggggggaagcagtggctgccagtagcgccgtaggacaagagggagacaagacaattcgtgaatcatcagccgcaagaataaaaggtccccatgatccagacgcgccctagtccagttgcgcaaagatcgataaattacacatatcaagtcataaacaaggaaaatataactccagcccacattccagatgtggttccggcatgaaaatgagttgcagattagtcaaatcgcgaagagttatgagaaggatagcactcaaagaccaatcatgtggtaccagcttcgacttgacgaggtgtgcgtctttccgaaggcagtggatccacagaagccccaactagaggtggtcttcttgaggagggaaaatggaaggaaagttggcggagtcgagtaggaatcaatcgagaccaggtggattgacccgatgaacccgaggcatggggtgggtcccaaggctgatcacgcctactctgtacatgctgttctcggtttggagatacgcttctttcctctggagatgtcgattggaatattcggctaggcaagcccatctggcctctgaatccgcttgccctgccaccattccaagcaactcgagggggtctgaggattgcatccgggtggttcgaggctgtacgacgaccctgacgatctgtgacagactgtgcttcggtctgtgcacggggtttggggacatagtaatcggccttgcatagagggcaacatgcccttctgctagtaagccaggggtcgacgcatgaagcatggaaagcatggccacaagtaagtccccggatatcatcatcgtcctcaatgatatctaggcaaatcgcacaagaatcgccagggttgggcagaagatcagcagtaacagcattaccaatgtaggcaccttcatcatgttccccaatatccgtggtcatgttttcattggtcaaggaatgctgccatttctctttctgtatacctgcaccagtggactgccggttggaaggctttgaagatactgcagggcccttctccgaagtctgcaccagagggccatcttgtacctcttgaatggggggtggtaaggtatcaacggaatccacccgtacatggcccttggtagacggtgatattgcagccgtgtgaaccccaaccgcctttgtcacgatatcactttcatcctttaggctctgtggcctgctatttggggctgtgatacctccttctgttgaaaggccctggttggcgcgagatgatctccacactttgtacttgacaagtgggaaccgcccgttgacttcatccatcgtcattagccttttttcccttcgcctgcgatgagttcgtggcatggtgaccaagtctatgggctctcctacttcttcactgcggagttgacgatttcgttggttatatcgaaagcagtatttgactccaacaatgatcctgcgatgaccgtcagatgccatccctgaaacactgggaggctggcctgttggcctgggcagggggtatatgaagcaacgtaccatagatttgtaaacacaacaccaaacccaagagcgacgaagaacaataaaggtgagcttgtagcattattcgaactcgaaccctctccgtcgctactagcagtggtggtggcagcagcactactagaggctgatgttggcgttgaagacattccaaccgaaattcgatacgaaaaggatctcactcggaacgttggcgctcggattattgttggagtctcagttgcccaaagttcgatccttcatgccttgagttgtgtgtacagggcaaccctgtatgtaagtttgggtaagactccagcagattaagtccaaggcgacgagaacgtggacgggaatgatccaggttatgtaccctatgtgatagactggatatttggagattaaacctgatggtctgtcatggatgattgaccgtaagcagagcacacagaacttcctacgaagagaaggtgaatgccgagggtcggtgtcatatcattatcaatagcaagagcagaaggaacctggaggtaaagagaaagaagaggaagaggaagcgagatagagagataaagagatagatagagagaaagtggatcagggcaggacggaggccttttgatttctgggatgcatgcggatcgagactcgacacctgaggctgtgaatcacgggactgccttactgtaaggtacatccacatttgaaggggggatgagaccagggctatttacctgccccctttctttctttttctatttgaagatgatattattacatacctggctaccttcaagggtacatataagctcgtatgcatatgtacactactctatgaatcagtatagctatatgtaatgtagtatggatacagtacaatatatatgatatactactatacacacaatgtgtaatcaattcactactagttctttagattgaattatacggtaagagtggcttacattaatgtgttggttttgtgggaaagcccaattagccgaccacttacccctcgtaaagtgaaacaagaaagatgtcctatatagacatacatatataatataatgtagttatatgctggaaatatggtcaatatcaaagtttcacacggctgctacaccgctccgtacttcccgaaacctctagttcggagatctatgaactctccccttcatcacatctgcacaccccaagtctcattatggctgaacccaatccagtggttttctttgatattgcccttggaggtaagtcaatttagttattttcatgtcggctctagtgtgcggcatcggagtacatagtctggcatggcgaactctgctaagtaatataatccatacaggcgagtctctaggtcgagtgaaaatggagttgttcgccaatgtcactccacgaactgcggagaatttccgccaattctgcaccggcgagagcaaaaaccccaagggacagcctcagggctacaagggaagcaaatttcaccgagtggtatgtgatgaagatccttggatggcgatgcggaattaatgctcattgtagatcaaagacttcatgatccagggtggagatttcatcaatggcgatgggactgggtcatgtactatctatggcacctcgaaatttgccgatgaaaatttcactctcacacatgaccgtgccgggttattaagtatggctgtaagtctgaatctcgagaccgagggggatgtttaccccgaaaggatctttttactaataccagcagaattcgggcccagacaccaatggttgccaattctttataacaaccacagccacaccattcttgaacaacaagcatgtggtcttcggccaggtgattgatgggatagatatcgttaaaatgcttgaacacacccgtaccaccaaagacaagcccaaccaagacgtgacgattgtgcaatgtggagagatgtaataataattacaatagcaaacacgtcctacaaatccatagctcctagaattgcaggaaaataatttgaatcgtgggaaatatatcaatttcatatggctttagtaaccagggctcttctgatattccatagtgggcacagacgtgatataaaaaaaagtaacttcacagaatcccgtcctcaggtctagagcttgaatttattcagataatccgcagccagtgagatagcctcctcgaccttgtcagcgttggtaccgttaccaatggaggtaggtccttttcctcctgcttttcctccaacggcgccagagacgacggccgcccagtcacttgccgaagcaccttggtcactcagtgcctgtgtccgaattagtataagaatccatatgtagtaatattctaccatttgatttcccaaatgcaagaagggtagggctgatgtgttctcttactcacctgagagatgtaacatccgtgtgaaacccggccttgttcagagtcggccgccaatagataaacactcttaccctgcatcttggacttgacatggttgagagattcactgacagccttggcattggcagaaatcggaagctggaccacaagccacgacttgtcttggttttcaggagcctcgaaataggaggtgatagcgtcgacggctttcttcgattccagtttttgttgggccttttgatcatcgagaacttgcttattgatcttggcaaaccgttcgcggaacttggccttgcggacggcggagattgcaagctggttgagatccacctgaacttgcttagcctcctgctccttttcagagcccaaaggcaatgcatccagccgatcaaggcgctgtccgaattcctcggcaactctctgcacctcatgtgcatcctctccagtgacggcaataattcggcgaattcccttggcaatgccactctcctccaggatgatcaaatccttgatatcgcctgtcttctgcacatgtgttccaccgcagaactcaatgctgacttcctgccaacggggatctttgacattctgcaggatctcctccaattccacaccgacagagacaacacgaacaggatcagggtaagtctcgccgaatacggccctgacgccagaaatttgctgggcagtggcgagcggaagttcttgggagtagacagcacagttttgtcggatataatcagtcgccttggcttcgatcttctcaagctcggcgtcagagattgcgctcttgtgggagaagtcaaacctaagcttctcggcggccaccagggaacccttttgatcaacaccatcgcctaggatttccttcagagcgaaattcagtatatgggttccggtgtggttatttcggatgggccagcgtcggagctcatcatactcgcaaatgacagaattgccgacactgaatgatccgtatttcatgaagccggtgtgtaaaacgtatccggcgtaagactgtacatcgccaacttcaagctccgcttgtccgtcgatgattattttgccggtatcattttcctgaccaccctgttcggcatagaagttcgtacggtcgagaatgacgccaagctgtgccccctcaggaacatcgtcagtgctattgtgaaaagttttcccgtggtaaatagccttaacgtgagaagtgatattaccccggccgaatttaggcgaatcatccgttttttgtacgtcgttcattttctccaggttgcctaggtcatggacatcaagcttaactgtgttatcagcagccttcttttgacccttactagcttcctttgccttcaagcgagcctcttcaaattcgacatcgtcaatgcggagaccacgttcctcggccatgattcgagttaggtcaacagggaagccaaaggtatcgtacagtctccaaacatcagcgccatggagcatatcggtgcccttggctttagcatgttgggcatattgctcaaattggcgctcacctctatccaaggtcttggcaaatgacaactcttcctcgtctaagatttcgatgacatcttgctgcttgcgcttgagttcagggaacatttcacccaactgatccacaacagtcggcactagcttagcgaagaaattcccaatatcgacctggaaatatttccgcgcataccgagctcctcggcgtaggacacggcgaatcacatagccacggccctcgttgttgggaatgactccatccgagatagcgaacatcaaagtccgcacgtggtctgcaataacacggtaggcggtgtcaattccatcggcatcgtcggcgccaaagtggccgcggtattccctggccccagtggcattctggatagcctggaatataggagtgaagacatcggtatcgtagttggaaggtttgtcctggagaattgataccagtcgctcgaagcccattccagtgtcaacatgtttgttgggaaggggtctcaaggagctatccggctcgcggttatattggatgaagacgttgttccagatttccagcacatttgggtcgtcttcgttgacgagatgagcagcgttgcgtccaccgatccgatcgtagtgcacttcactacaaggtccacatgggccctggtcacccatttcccagaagttgtctttcatgtctccaggaaggatgtgagattcaggaacgcccaccgatttccatatttctttggcttccagatccggttccaatccaccagcttcattgccctcaaaataagtaacgtagaggcgatcgggatctagcccatagacttccgtcaacagggtccacgaataagtgatagcttctttcttgaagtagtcgccaaaactccagttgccgagcatctcaaagaaggtctagagactttgtcagcacttcttctggtgaatgatagaaagcgagtttctatactgacatggtgatagctatctttgccaacatcatccagatcctgtgtcaggttagtcagtgtaccataagaccctcttaaagtttatcaaggcacacccacgttatgttttccaccggcacggagacactatccagttgtatcagcaacagtcccaagtcggatgtactggtgagtgtgaattatccaataccttttgcgagttcgttgcgcgtttcatctttccaaagtctgatgaggcgtcaacggtgcccaggaagatggacttgaactggttcattcccgcattggtgaaaagaagagtcggatctgacagaggagcgacgggggaagaagggactgtatacaagaataacttcaggtcagtccatgtcgttggcgggggtggaggggtaggcaaaaaaagaagaagaatgggctcaacgcaccgaatgtatggccattttgtttaaaataatctagaaaggtgtctcggactcgttgagcagtccattctggaccgagagaagtcatcctgtcgaatgtgggatgcttggttgacagggagtgaacaaggcaaggaaagaatgttctgggttgatttctgcgaaagagatgagtcaaagcccgttccccgttcgtcaccaccccagaaacccgcatcgagcaacgaaatgcacttgaccccagatctgtgcacttagaagttcaaacgcttttctttccttttcttcttctttaattattaaccccacacttccaaacactcgcaagagaaggagagagagatagaaagtgtggatggcgggtgaggaaaatcacgggaagaagcgcccggccgaagctgaccccgacggcgcgcaaccgttaacgaagagatttggacacctccgaataggtaggcaattgaacttgaaagagttgtggaagttgtcaagttaacatatttgtagaaaataacgtgccaatctccgctcgggccaaacccaaggggcatatccaacatatccagcctatccagcctcacattgaccaatatgaccaacataatcaacataaccaacgtaaccaagacctatcctcctcaaacgatgcaatgatcttggacgacaccaaacatacgacctacattcacaacctggatcaagaattaatggaagccgactctcctggcttggtgttttcaccattcgcagagaaagtgctctcagtccctcaatccgttctatccgactcgaagccctcggggaaagaactcgttctttatacggaaccatcttccctcacggttcccaaggaaaaggataatgttcgaaaggcaattcttgaatctcgagcgcgagctagagagaacaaggttacggaagatttatacgatgatccaatggatattgatagttaaaagtaattagggatagggaatgtataaacttgtacctttaggcatacaaatgtacgtgatctacatggtagtacatgggtgtactggactctacggagtacatatccaagtagttatcagattgcatacccgtatgtaaattaccgatcccctgtaatttaccgtaaccggactcacgtgactcaccgctcccgaaaaattttctggtttttttgtgtggctccgactaaatatgcactcggcttgataaaaaaaatttcctctctcccccaccatccctcttcccatccctccctcaaaatcacatctacaatttcataatggccgattctgaggtttacgacggtgccgtcggcatcgatcttggtacgtttttgctctactaaattcgaccgcacagctgctaattgccttttttctttttcttcaggcactacctactcttgtgttgccaactacgagggcaccaatgtcgagatcagtacgcttcccccctccaaatattcgatctttctctcgaatactgactatttgatcagttgccaacgaccagggtagctacactaccccctccttcgtctctttcaccgacaaggagcgtctgattggtgatgccgccaagaaccaggccgctatgaaccctgccaacactgttttcgatatcaagtgagttgaaaaaaaaaaacataaaaaaaacctcgcgcagcctatcaattcgcgatatgcgcattctccacaattccaaattcgttctgactctaatggaacaggcgtctgatcggtcgccgcttcgatgaccccattgtcaagaaggatgttgagtcctggcccttcaaggtcatcgaccagggtggcaaccccgttgtccaggttgagtaccttaacgagaccaagaccttctctccccaggagatctcctccatggtcctcatgaaggtatggcgaaatgtatatctcatatttgttggatttgtttgctgactatttgggccagatgaaagaggtcgctgagatcaagctcggcaagaaggttgagaaggctgtgatcaccgtgcccgcctacttcaacgacaaccagcgtcaggccaccaaggatgccggtgccatcgctggcctgaacgttctccgtatcatcaacgagcctactgctgccgctatcgcctacggtctcggcgccggcaagtctgagaaggagcgcaacgtcctcatctacgatctcggtggtggtaccttcgatgtctccctgttgaacatccagggtggtgtcttcactgttaaggctaccgctggtgacactcaccttggtggtcaggatttcgatactaacctccttgaccacttcaagaaggagttccagcgtaagactggcaaggatctctccggtgatgcacgtgctctccgtcgtcttcgcactgcttgcgagcgtgctaagcgtaccctgtccaatgctacccagaccaccgtcgagattgactctctcttcgacggtgaggacctcaactcctccatcactcgcgcccgtttcgaggacctcaacgccaaggctttctctggaaccctcgagcccgtccagcaggtccttaaggattctggcatgcctaagaacaaggttgacgagatcgtccttgttggtggctccacccgtattcctcgtatccagaagctcctgagcgacttcttcgatggcaagaagctcgagaaggtaagacaagacagcactacttgatctaacgtcaaagccagttacttatcttttttccaatagagcatcaaccccgatgaggctgttgcctacggtgctgccgttcaggccggtatcctctccggcaaggccacctcggctgagaccgctgacctgctcctccttgacgttgttcctctttcccttggtgttgccatggagggtaacattttcgcccccgttgtcaaccgtggccagactgtccccactatcaagaagcgcaccttcaccactgttgtcgataaccagagcactgtccagttccccgtctaccagggtgagcgtaccaactgtgctgacaacacctccctgggagagttcactcttgctccccttcctcccatgcgcgccggtgaggccgccctcgagtgtgtcttcgaggttgacgtcaacggtatcctgaaggtcaccgccactgagaagacctctggccgcactgccaacatcactatctccaacgctgttggcaagctttccagctccgagatcgaccagatggttgacggtatgtttctcccactaacactaatatttttgactatatgctgacttgacaatctgtagacgctgccaagttcaagaccagcgatgaggctttcaccaagcgcttcgagtctcgccagcagctcgagtcttacatctcccgtgtcgaggagattgtctctgaccccggtatgtccatgaagctcaagcgcggcaacaaggagcgcattgagtccgctctcagcgacgccatggcccagctcgaggttgaggactccacccccgaggacctcaagaagaaggagcttgctcttaagcgtctgattaccaaggccatggctacacggtaaatgcatacatgggaagacatgaacatagacttatggccaacgaatttttcctctttcccgggactctgcttctcagggaatctgcgccatgtagaccttgggcagggttggtctctgtcgcgctttgtttatgaagccgggcaacttgggcgcagttttcttttcttgaaaagtatgatttgatttgttttttgtagacgaagttcgccatctgcaatttaatgacattgtgatgatctcctctcattgtaatacttggaataccgggtagttctacatggtaatatagtgtatgatatttttggcctcgaggcggaagcgcgggggtaacgtgagagatacttctggactgcgcacctccgccctggaactttttacaacaatcgcttccaccatgcaacgcattatagcccaatcaattcgctcctcttgtcctcgtcttgtggaacaccctcaaacgactcgatctttatgtcttctaccccgagcccagcgcgccgttcctctgaaccggcgtgagtttgccaactcgcctgccttgtacaagaaaaaggacaaggccaagaaagcttccgcttccgcttccgcttctgagccagaggaaagctccagtgctccttctgaagatccctttgatctttcccaattgcacaatggcatctccacggctgttgctcggctaaaagatgatctgtccaagcttcgcgcaggagggcggttcaataccgcagtcctagagagtttgagggtccatctgagcaaagacagcaaagattcggtcaaattgggagatctggcgcaggttgtgccgaagggtggacgcatgattactcttttggcagccgaggaggatgtaagttcatgatgccttgttagggcgtgagcctgctattgctgtcccaacgagccaactctaatacatttcgagcagcacttgaaacctcttacttcagcgatcgtctcctcaaacctctccttgacccctcagcccgatcctcacaacgccctccagctcaacattcctattccgccacctacaaaagaatctcgggacaagaacgttcaagccgccaagcaagcattcgaaaaggctgccggtttagtacgtgactctagaggtgccatgcataaacgtcttcaggatatgcagaagaagaaattagctcggccagatgacgtgcgcaaagctcacgatcagatggagaagattacagaccagggtcaaaaggaggcgaaggatgcattcgaaggtgccaagaagacattggaacaggcctaagccaggaaaataatgagaatcataacatatggcatggcaatggccgattgtaaaaaagactttgtaaatctaggtacagacagaggcataattggggaagatatggggaggatatgggaagaacagaggaaaacccgatcaacgaaataaatataatacaaatcacttctagcacttagttcacatatcctcagacactcttggtcttgcggccagcagaaacaagagattcaattttggccatgaactgcgaggtcttcccggttgtctggtaggtcccgttgttccggaggttcttcaacacctctctcaatacggcatgcccatctttcccgacttcagacgtggggtagtttccctgaacgaacgtttccatgagagacttggtgctttccgcgtcgatgggactaaactcgacattccgtggctccacaaggtcacccttgcgctgtgaaattcgatcggcacgaagctgagccaatcgcttggtctcttccaaagcctccgccttctcgttctcattgttgaaaagaacgctctggcccttccacaggcgccttccaagctcatagggcgggatatagccgttggcaatgcggccgcccaggctggaaagcttttcgtagacggcagccgagcgcgagttcacgtctgtaggaattgaaggccatgtctctttcaaagtagagtagctgatctcctgaggctcataacgaataggcgttggcctggatttgatgatttgctcttgaagaatttgatcaatagccgccgcttcgctatcttcgccgtcgtcattctcaggggtttttgcgttcctgcgcggcccatttcggttacccttggcgcctttggcgaagggtttaggtttgcgattttgaggttgattgccgcctcgaatgtcgcgtgatctcgggctgcggataatcttaggttgctctccaccgctagctcgtgcggctgcaaaagatctagcgtcaatcactcgaggaggacgagtttgatactggttggtgcgagctggcgggccattgggattgcgaggccggtaggaaagcgtggccgatgaagagcggggattgggtttacggttgtctaatgggcttatgttagaattcaaattccagatggccgaaatagttgcgctactgcatttattttgcccagtgcggcttcccttggatgtacctaccggatggctgggctcgattttcggcggccactgtacgagtacaggagaactggcgagcaggtgtagaaagaccgagttttgtccgttcacagtgcagcgagatctgcctcagctgtggccgaaacatgttgtattctgaatgaactaggtcgtgtccctagaacgttttggtaaagagacgcggaaagattgaacgaataattgcagtcacgtgaggcaccgccttcctgcccgctccaagtaaacgcagccaagtcttcctttggttcattgcaatacctttcgactgtcaaaatgcttcgtcgaaagccaacggctattgctattacttctgaggacattgctgcctttgaagaagctagacttcgcaaactgtctgaagaaaacaaacacccagaacagcacgcaaaggcaacctccaatgtcaacatcgaccccagtgatgagctgaaaccacttccaggtgacaaggctaggattgtccgaacccgtgaagaaagaataggcattagtcgacgtggttgactgtctacaccacgatctcgaacccctagaccaccattgcatgttggaaggacttgttccacaccatgacatttggatatgaggtacataacccaattttgatatgcttgcatgtatttcttgccctttgaaacattgaattctcttttcgtcacatcattcaccattaacaagaaacaaatagtgcaggatctttggcgttgaggatatgacagtctcatacataacacacccaccatcttgcttgtatgaaagcgtatgacagagagtgatcgagcagtcatagagcgtggtttttttttttttgagcatcagatcacggcattcctctgatatatcaatctaaatatgccaacatatctcaccatttcccctatggttacctattggctaggacgttggtttaaccccagagaagcggaatggtacattggaatatcttgttaataaaacaacacaatgcatactactttgttcatctagatcacctccatcgggcatcttggaaaggaccaatcctttaagtgacctctctcttttggcctatttcgagatatgtttgttctgatcagaggctttagcttgaaaatagacacaaagcatcaaaaatattgacgagcgaggatgacccgagaatccatctcgtatagaacaagagtatttcaccactcctccgcccaatctgaatagtgtcttttccacgggtatcaattattttctaaatgtagtctactaaatagaccaattcatgtaagctgatgatgtatagcagggttcaggcatcaactactatcctagccggtgagatatcatgatggttggacgtgtctacctcaaacttttcctcattgagccatgcttatgtcccttggcggttgtgacgtgataaagaaaaacagagcaagatcgcacaaaaaagaaaaaaagaaaatagggatatagagtgataatagcaatggttgcctgggatacttaaacaagaacccgcaggccgtaaaatctggcgactgaattggagaaaaacaaggtcgtagatgatttgggtatatgtgcgtctcatcctctttggcgcttggacatattgtcggaggtaacatcaactgggtaattccaccggcgtttcagcccttgtggatcatacacactagcaacactttgttgccagtctcgcgctgaaaacacaacagggggtacctggaactgaggaggcgagagagactgggtagacgtgacagagggcactttgttaggtgtctcgtactggatggggtattgggagttcataacattttgtacacctggcactgaattgtttatagccattggcggggagtttgcgctgacggtagaggggttcacggagaaggccatatcccattgactagagcgaaggatcagtaagagaccaagcagaaggtgaatcatttacgtacgtgataattcgggtcggatcccagtggtcttcatcgaccgacggggcatctagaggatgagttgtttgaggctgatgggcaaccattccgagggattgtatctgagaagatgtgtcggacttcgagtcttcagcatcagtcgagatcggaggggttaccggaagcggattgtaacgcactctagattggagttgactcaagtgcggatgatagtgtgcatccataggtggactgggatggtagggttccgaaggactcccgtatgggaaactgggcttcaactcgaaaggacgatgcatgtcggcggagaaagccagcctcaatgaatcgatttgagcttgaatctcaggcatgggccaggctgtggagcacgtctctagaattctcatatgacgggtgaagaattcacgggcatctgaattgaactcagggtcgggggaggtaattgcaacctgctcgcattagaatgggtttgctatgaaaaaaagaagaaagtcccataaattgttgaatacttaccaggtgcagcatcgtacaagtcaggatacaatatatggcaaaattgatgcctctttgcatgtaaagtaggccagatagcccgaatctttgcaagatagcttcttgtagtcgacagaggctttttgccgaggagtagcatagtgacatatgagtcttccattcaccaccggccgcaaaagattgagaagcgaagagttgagggcgatgtaacataataatggcgagatggcaatgggaatgcatattgcccacaaaatgggatggaagccacggtggggagccatcggcaggataattgacctgcaggtctggaggaaggttacgaagccattctgcgaaaagcgggttgatttgtacgaatcgggcatctgcgccccagtccttttgcttcttaactttgtgatagatatctgtaatgatgcggatgtgatgtgcgttgcgaacgaaataggcgtattgtcttgagcggtcgatctcataatgatcgagacctctgatgtctagcgtcggacgcatgtccaccgtctcaggatcaacaccgtaatccgaacggcctactttgatcagaagctggttgatttaataaaggatgcgacggagtagacttaccttggggcccaccgatcatcacctcaaccaccaaaagagcctgccacactctggtgtgcaccaagcattcgattggtccgagttcacagggcttgccatcggcgtgattgctgtaatgttcatgaatgtccaaatctttcgccattgagacaatcgtcttaacagtctgccaggatcgataatagtatcctttcttcggcaaagattcccttgcttttagtagcagaattaatgcttggatagtactcagacgtggtacatccatgaagctagtctcgtgtcctatgaaacgtcagtcttttgaagatggctggacgaatatcaagtatcgactcacggttagccaaagcaagccactgagcgccttctgcaggttcatcagataaacggcccgcgcaggcaaaaagggcctcgagaaggagaggagagatagaatggcgatcatgctgccattgatagtacagatgggcacgagatacgacaggaacatagggatgtatttcatcaaagtagatcttgaaataagccataacgtcgtcttcggcaggcatgagctcaggggggattcgaatcgtcacgcccgatcccgttctgagaggtggaaattgctcttcaacgtcgtcttggacaggggcgtcgggctcaattcgatcggtgcgttgccttctaatgtatggggctatcgaaggtagagtgttagcggggaaatccgtagaacgggtaatgatgccataccaatcccactctcgtcaatcttcaactccccaagtacatcactgaggttttctgcagttgactgatcgttatcaatatacacattccgatccgatggacccatggacgaagtttgcggccccggaaacatttgagactgttggaaagtctggtgtgacattgtcatttgtggtgactgaagatcgttgtagatgttgggttgagcctgaggagggacgaattgggaatacatgctcatgtgatcatatgaggggatagtattcatggttggttgactgttgtccttgaagaccggagctgctggaaatgtatgagaaccctcggctgcggcggaggggcctccggtctctagagtcgactcgccctggccatcagggagaaagtccccatcttgcccgatggtcggagggacacagactagctttagacgagtgcatgcagaacaaggccatgtatttgtcgtagccgcatcacatttgattttccttttccggcaaccgttacaggctcgcatcactaaacgtcaggcttgtcagtatgtttttgttgacttgcgatggacacttttcctacccttcagcctcttatgtcggttatgctcatcaacgaacacatagtctacaccgatgaatggttagttgtcaatgaaatgtgtaagggatagatggtgcttgagggtcatacttttctggccttctctcggggggcccgttgggggcgcaaatgaataaccttgcatgcttgcccgtttgataacaagtgtcgggtttgtaaaatggcgtagactgtgatgatagaggcaactcaagttggtattgggactatcagggtatcaagaaaggaaaacaaaaactgtgctgggaggcctatccacaaggacctgcctcgggaaattgaaggagtgagagaaggtggaggtcgaacctcgctctgcgagatggatcgaactgcaccaagagacgataaggcaggatggtggaatctgtgggagtagtcgaggcgcaagcggattaatcggggcagacaacggctatggttgcaacaaattctagagacgttgctcaatgacagatttcaggttgtcccaatgttgcgaccaacttgctgaggcttcgcgggaaattgaccggcagcagtcgccaaagtcccgagacgtgcaagtgtcctgcgaggctgttatgggttgggagatttgcgctctcgtatatcaagcgcgtggggctagacacggaaacaagatcaggccgtctttggtctcgaatgtatgtaatgaacaaatagtcgaatgctgtcataagtaccgggcagattagcgtcggttcccacacatatgatccagatcaaataaaatcacacagaaaaacattgagagtacccccgaggcagctgcttacgattcaggtaaatagaagggtttcgggtgcatatccatcgatgtcaatgtcgcaaagtactccgcattcgaatcaacgagcctggcgcattgcatctcagtagggaagaagcggaagaagcgcagagcattaggaagagcagcaacgcaggttcacaggtggaggcatagagacattggcgaataggctgtagtagttcaagaatccccggggagaaaaaagaaaaggggaaaattcgagcttgttgtgagagagggagggagggagagagaaggtcagaagctgaggggtgggaggtaccgcgggtgccaagtgtggaagaggatccaatagcgcccgccgctgtggatttagggtggaggggcgatccggactggtgattttctatattttctgtttatgaggtagcttatggagatctagggctggatttattctggcagagacatcgaggaattattccagtggattgtcgcgtataacatactacgtacacctatataaggtagggttatatagcggttgatgaatcagggatgagggagtctccacttaggagcgatactgttaccttagtgaatcagtagtaagttttatgctagttgactactattacaataattatcattatgtacgtggttatatagagtgccgggtatacggagtacctagtacctagtacctaggtacatatgtacacctgtaacatatgtacctataactatatgtagtgattcaattagggaaaaagcaatccaagaataaacacaagtgaatctttctgaaacagccccaattattcgggaaaaagacacgttctgtgaaactcgagaatcagccaaaactgccgtgacttcggacacataatgagtttaaagccaaactcggcctgtcgatcagccgcggggattgtcaggttacatacggacggagtaactttagccctattctgagggatagagtgggattactaatgatgtattaagattactaatgatatactaatccagacaatataacggagtagttaagtagagttatcatggatattccaattaaaactctggcaaattagatatgctgctcatcaaatccctcaaaatatagaatcccttttcacagactgtccccaggtactccatactccatacgccgtacgcggagtcatccagtactcgcacgtggacaggataagctggtaaacgttatcgccgcaatttttaccctcaacacactacctctactcgaccacagaccacattacccctacccctcgttcatcatggcggaaatgcaaaattcaaaccccacgatcctcaatgccgctgatctccccacgcggttgcgacccaccaccactcgaaagtccgaatatggtggtatctttacatcggccctgcccctcgccccagtagacttcgagagtcctccgtcatcggactcggaggatgacaacctactagaggagcctattgatgaacaggaaatatatggtaagcctctctctcacatatctctcccaggaaaagaaaaagcccatatgtccgagatgattggcctagctcaagtccactaaaaccgtcagacctcatctcgtcaatctccgatccggaacaccccatctcactcggtgaattagccgtggtctctctcccagatatcatgatcaagccaaccctccctgacgtccctgattcgcctcttcaaactgtcaccgtgctgatcacgcccacaatcactcactgcagtctggcaaccgtcatcggtcttggcgtccgtgttcgtctggaacaatctctcccctccagattcaggatggatgtgcgtattaaggaaggtacacatagcaccggggacgaagttaataagcagctcgccgataaggagcgtgttgctgcggccttggagaatggtgcgttgatgggggtcattgccaaaatgatggagacctgccactgaaatttcaaataccctttgtatactataagccgggtcctcgaggtaacgagctatcactggcagatagaccaggccctcttgtgtgacgaccgcctacgatgaatgactcttccggatttttaaatgacttgcattggaatgagtattagaagtacatatgaactttgataccaccataagattgatcaaaccggatcaaaggactcctcctgtagccaaccctatttcgagtagtgaaattttttgaggtcatgagtctagcacgccactttccttcaaacccttccaaagctccggctccaaaaacttactcacagtaacatcctcggccaggcccttgcgtctccgtgttttcaagacaaagtcacgcgcagtagccatggcaggagccatctccaagggcttgagcttgatatcacggtccagtggatcaccaggaaccacactccacttatcgaagacaaggtttaccatagcctgaccttgtgtgtgaattcgaagatcggtctcaaatccaaacgagtcaatcactgggatcaaaccgcgtacggagtaaagaggagttcccgcaatgggaccatccgacaggacgtgacctcttcggcgcgacaagactgtgtacaccgaagccacggagtctgcaggtcctgtcattgtgacagagtagatcggttccatgagacgcggagatgccataaggaacgacgagtatacagcacgacgggctgtagggatgatctggcctccaccgcggtagatagcttgatcggccagggacacgtccgtgagcctaaactttgtgtttcgaatggctgaacttcaattagtctcacattcgtcatatgcgaatgagaagggggaaagaaaacttacgttcttcacaaagagggccttctcgtgtaccccagctgaagccttgggtgatagagtccctgacagtaccgagaagtttcttatccacttgagagggtaaagtgtcatcttggagtatgttgggacccatttcatccggtccaaacgcccagatgcttcgcgctgcaagcttatcccaatcgtaattttcctcaaagtatcgagcaaccttccgaatagggtccttgatactgactttaccactttcaatatcctctgcaatcccatcatccaaaggctccgcaatcatcgtgattttatttttcttattcggagtgattgagtaacacatgatggcagaggtttccaccacagtctcacagaaacgtgtaacggggtcggagaccttgatctccatctccgagtatagtttccggaggtcatggagcacacagtccatgtaaagctcgccggttcctagaaccacatgctcgccagactcctcaactttggttgagatgagggggtagctcttgttaattttccgcaatccatccaacattttgggaagttcggatggattgaccggctcaacggcgaccttgaacactgattcggtcatgtgacgaatcgggcggaagatgtacacatcctcgtcatcttcaagcttaaggggtaccagcgtcgcagtcttcacaatggagttgtcgacaccacccaaaagaacccaatttccggcggggacaccgttggtcgggatattgtaacgcgtttccgcaatccacgtgtcggagatggttgctaccaccatgtcttcttcatcttctggcgtgtagccctcgccgagtacacggacctgctgaccaggccgcgctgtgccactcataattcttccaaaagagtagaagcttgcggcatcagtactgctgaagagtttggtaacatgtattaccaacggtccgttttgatcacaagcgagcatcgaggccccaattttggtatccacgggcccagtgtagtatcgctccaggaacctttgggcaccttccaccggggaaggaacgtgttgaacaaccatgtccacgaagccagtggccggcccgaagaaattctcacagactagactgagcagctccttggcatcaatcttgagctgagatggcttcaaattgacgccgacgctagccagagtctgtttcaaatcctcgggactctcgctaagtgtgtgggagtagagtttgtagatcggctccaagacaaacttgacgaatgaccgctttgcgttctcctccactcctttgcgagtgaactttcggctctggggattgtagaagatgtcaccccaaagtcgcgcggcaaattctgtcgagtccaagctcggataactgtctgcgtacatcctggcaaatgactgcaatgtaaagcaccagttcattgagcttgatgcgaatccaacattgcccttctcggggctcagtcggagtcgctcgccttggcctggcaaaacgttctcaataatcgtattgacctcttcgatcacatgcttcaatttgaaataggcatcattgggaggaagtttgagctccagaataagtcgatccatcttgttgactaccaaggtcaaggggagaccttccaatactgcatgcttgataatttgctcagtgttcgcctggacaccctcgacaacatccacaactaataccgcaccatcagctaggcggatagaggcagccacctcatcaacaaaattcacatgcccgggggtatcaaggaggttgagcaggtgagatttgcctttggtgcttggaagaacgagactcatcggtgccgatttgattgagagaccgcgttctctctctaggaaatgaacgtctgtgtatcgcagttgttcttctctcttgcgtcctgtgcgcttgtccagccgctctgttaggtcgtgcgtctgtttgaccaacatatccatgaaagcggtctttccatgatgcaggtgaccgacgattgcaacgtttcttatctgtgatgggaaactcaagagatctgacatgaactcccgggaaaagtatacaggtgggagttcggtctctgcgatcgcaaatttcttctgctggacgggggcaatgatgggctccgacaatggctgagcatcttcctcctggaccatggtttcaacatcctcgccgtagacttgttgtgcgctggggtagtattgcttgtcttcgtgcaagatgaccgcatttgaaggaccctctagacgtgagattagtgagattgcaggctttgaagaagacatattgacataccatcaacttccatcaactgtagatcatttatctcctcttcttcttcatcgtcaaaagcctcatcgaacttaaaggcttgaggttggacatcttcatggtgctcctcgtccgattccgcatcgccgatgtagttaccaaatctaggcacaattagcaaggctccagatttagagagtcaaaagaaacatactcatcatagaggtcatccataatgaatcgtagagaacgcgagcgtgtgaggtaaaaaaaagagggacccgtagctccagacgcgtgatgccggaggatctcaactttcacctggtccgagcgtctcttcggagtactcgtgcctacaccgtacagctcctcactccccaccatataatttactcttatagatgcccctccctctttgatcttttggatctttctttacttctctaaaatcctctctacttctgtatactcttccggtcttccctacttccaccaccttttctttctccaaaatgtcttctcttcctcctgtctacattgtttctactgcccgtactcccgtgggctctttcctggggtgagcatgcttgcattcgtcttttcccccttgaagacttgatctgacatcggttactgtagctccctgtctagcttgactgctcctcagcttggtgcacatgccattaagggtagggcatataccccaagctatactatacctattttcaatgctaatagtaacttgcagccgctgttgaacgggccgagggtatcaatgcctctgacgttgaggaagtcttcttcggtaacgtcttgtctgctgggtaagttatctttgctacatcttatactgcaattgagattgacgtattccttatagtgttggacaaaatcccgccagacagtgcgccctcggtgctggccttaccgattctaccatctgcactactgtcaacaaggtctgtgcttctggcctgaaggccatcattcttggtgcccagactatcatgaccggaaacgcggatattgttgtcgctggtggtaccgagtccatgtctaacacccctcactatctgcaaacatctcgcagcggtaccaagtttggtagccaggccctagttgacggcatccagaatgatggtttgactgatgcctacggcaagcacgatctcatgggtgttgcggccgaggagtgtgccgcggagcacggcttcaaccgtactcagcaggatgactatgctatccgcagctatgagaaggcccaggctgcccagaagtccggtgcatttgacaacgagattgcccctattgagatccccggcttccgtggcaagcctggcgtgactgtttcccgggatgaggaacccaagaacgtgagttcctcttgttctctgcgttagatttattgtgacgttcattgaccgttctttgcgacttatagctcaaccctgagaagctccgcgctataaagcccgccttcattccgggaactggaaccgtgaccgcccccaactcttcgcccctgaacgatggttctgcagccgttgtcttggtttcggaggctaaggtgaaggagctgggcctcaagcctattgccaagattctaggttggggagatgctgagcaacagcccagcaagttcactactgctcctgctttggctatccccaaggctctcaagcacgccggtgtgagccaggagtccatcgatgcctttgagatcaacgaggccttcagtgttgtggctcttgccaatatgaagctccttggtctctctgaggataaggtcaacatccacggtggtgcagtcgccattggacaccctcttggtgccagtggtgcccgtattgtgtctaccttgctcggtgtcttgagcgccaaggagggcaagcttggctgcgtcggcatctgcaacggtggcggcggtgccagcgccctggttattgagtctctttaaatagtaaattctgttaaggaaaaaaacagagatgtgaaacgaccttcgatctttgcatatgagataccaatttcatttttgacggggaagatactcggtggttttctgcagacataccatacccatcctgcagcgacgaacattcgcagtatcagtaccatttcttagtatctagaatagttaatgaaatatcttgtatgtttgtgtccttccagttgttgcttcgggggttggtctgagatgaagtcagagattccagcatttcaacaccaatgtactcagtttaatattgttggtcactagactattggatggcatcaatgtgttttaataaatgatacagggtatgtctgtaaagcagtcactctgccccagtgagaatattaacttcattagcctgattttgtgtacatctccgctaaatttaggacagccatgctgcctcaaacccgaaaaagacaagagaacattaagaaaaatcgtttttgggagagaaatatgaaagagtgatatcggggatgctgtaagacatatgcctctgtagactgcatttatatcggtggatataccagccctgagtgttgcagtgcgttgtcccgctcgagtcatcaagtcggcatgtagataatgcaagtgttccatgtgtttcatgagaatccccagaattaatatatatcagtatataattcctcaagtgaacatagtactattaatttggtatacatttagaaaaagtatcgcatgcgtcgttaatctatcagacattataattgagaaaccccacaaaacaagaactcatgctttcaagcaaaggctccgacgaatgccatgaggagagcaccgcaggcaacagaaacacatgcctcaacgcgtcgtctgcccttgagggtctcataactcgactcactcaagaagtcctcggcgaggagttccaccaggcccgcgaagagcaaaagaccgctgctaatggcattggtgatgccaaccattagcaaacctgttgcgctgccaggatcgtagaggttgtgtagaaccaaaccgatagcctggccaagaggagttgtcgttccgtatgctagtgacataagccatggtttcattgaattcggcgcgaacagatccggtatgagcgacgcaatccgagatcctagggcaaacccttcaaaggtctgatgaaaactgattgcaattaacagaacgacaaaggaggtgccagtcgcaacactgagcgccatgccgatgaagatgctgtgaaacaaaatgccagcttccaagaggaggcactgtagaagctgacgttgcggattctggattggcacatctgtgtcggtctgctgacagtggctttcgcttacacgggatcgatgccggtggacaggctgtgactgcgcagaatgagcttgtccactgataagtccgtcgtcatccatgtagtcatccagtccatcaaggtcatcttcatcgtcctctttatccggtgatgagtccgccaggtgaaggcggtccgattcatgggacgagcttgaagctctcgtcgtccgcaacttggagttgtgtcccatgctatctagattgagattatctgaaacctgccgggcctctaggcccgagtaatcaatatctgcgttccccccgtcacgtattgagccacgcctaacctcgccaatgagattatcatattcgcttccatgcacgtgcttggcgcctttcattgcaaagaacatttccacgataacaacggcaaagaccgatatcattgcaacaaaacctggcatagcacgatatgtttgactccaaaatcgagggagacatggatcggtcagagagacaaatgctgtggggagcagatgtacgaatgccgtcgcaatcaacacacccgttccaaaatgtctcgatatgaagaggaaccgacggggaatcggaagacgagggaaacggcgcgccagaaccggaaaggagcaagctattgtaatcccagtattagcaatggccagtcagagagccgagagaagccagtgcataccgaatgtactcagccctaggatgaggaacagtgccataacatgcaacggggtgttatatttcccccgctgtttagatccgcatgccggtgtgtcctctgaagctccacctcgccgaagaagttctgctcgcaagagagcatcggggatttctgagattgcggagagggcacgcttcaagtctactcggaacatagttagaaactgtccacgatcaatttgcaaagacagctaacctgagggtagatccttcgcagtctgccagtcttgggcattctgcattttgttatagtctcgaatttgttgagctgtaaccacatccccagttggagaggggaattgttcgtaggccgggtaactgtccaagagatataggtatagtgacgcaattgggttaagataaagatgagactacacgagatggtcgatcaggaagacaacaaaaccagcagagatattattttaaaacaaaaaggccagacggtggtttttcagacgcgatccagtgagtcttgaactccggggctgcccctttcgcttagtcatacatactacgcacgtgggcaagacgagtcctgtgatttattgcagtgaagttgccgagaagtgatctgattagataaaataacatcttaggcggctccatgtcctctatctgctaccttagtccatcccttggtacctttgggtcgtgaggaagaggcatcttggccttgagtcctagaacgtgtttttgaagttctctctgtttccaccgatccgaattgagagcccatggccttggggctttgcggaacagatggctgaggggaatccatgaccgcatcgtcccattctttttcttctagcaattcccattccgcactggccatttcccctagaagattggacttcaatttatctacgatcctggttggggttgggagtttccatattcgcatgaattcaactccttctgatgctcccaggaaagaatgtgccgtgccatgagaatagtgacccaacatgggaaaggaagttgtccgctgaatcgtggttctgggagagtcttttgcagatttcatttgtgtctgtgtgtctcggccggcaaatactcgcatcagagttgaagggtgggctggcggagctaccagcagttgccacaagctctttccgatgtcgcaaacttcctcccaggagtccgatgagaggtttatcccttgagttcgacataaccatgcaacattccatgccaagagggtggctccttcaagaaagaaggcgtatgttgcgggatcttccttcgctaaccggggcagaggcttatcgatgaagagaggccgcgggcgtgatgtgtgggtgcgcgggtccaccgtcctcgatgcagccgggctcgacgaagattggtaatcagctccatcgtgaccgttgcgcgagcgatatgatgccgagggggtgtagatcgtaggtacaggatagtttttgtgaggcagtgtaatttcggcgggaagtctcaaggaaagatagtgtgagacaatgatcagaagatgagcgatgttagaaaaagacgtggatatctgttcctgtggaatacctgtactcgctctgttagtacgccacgagatgaataactgcttgaaagcgacctcgggactatggaaacttgccattcatatctctcaagtcaacgatcaaaccacatccaagcacataggtctcccgaccttggcccttcttcgtcgccttccgcaggccatagagattggcgacttctcgacaaagataaatacgtgactccgccgtcttgctatggagggaatgccaaacgtgctccacccgtttgctggtattttgaacgcccgccaaaattccagtctcccgctcttctagttgaaagttggcagattcagcatccgaccgtctgcgtgctagggcttctttttgcttggcaatctcggcttttttggcttcgacctctaatttcaaagcctcaagctgatgcgaaaccaattgtctctttgccaaagacactgcatgtctagtgcttatcatttggaggacccagcggggagagcaagctttgtccgtatcgagcaggtcttgtccgtgcggggaaggctcatcccacgagctaccgcaggtaacagcggtctcgatctgctttccaaggacttctttctctagaagaacttgagtgctgtcgattcgtagttgatatagctgattgcgggcacatgtcggacagtggaaagaaaggcgagattgaggggcacgcgagcatatggaacagctcatcgtagacaatttgattttattttcagctgttctttgaaggcgtaaggggcatttccatgttgcgttccaggataattatgggtgctacttgagtcgccgccgagaaccatatagaggagtgagaaggggtcgtcaaagagataataatcccacatgactcaaataatacgttgatatagaggatatgaccggcctcaagacatcacctttagccaatcttttagaggaaggaagtgaagaaaagacgggatgatgttcacatgcacctgtcgtcacctgacgctccgttatcgcaatcttatctctcattttggataagggcatctggaacattcacgaatcgaaacaaaagtgacttctaaatctactgaaacaatcatcggtcttggtatggcttgattttgacacctcatcatatcgagtcagcaaatccagtatgcaggcaacaccaaacaggaccagcaaaattcctcgacgggggacaatgtcaccccgtgtcagccaaggaagcaaaagccctacgggcagtgggagcccccaagagaacggaagccctcaattaccggtcgaagatctagcatctacatctatccatgatgaagccccatttgcttctaggttgacacaagggctggaggactgcaattgggaacaactccaggggaaatatgccgatgcaatggacgaacacggccgagtagaagagaacattcgtgttgaaacagccaagcttcttgaagtaagtctcaaagcatgttctacttgcaattttgtatctgagcaatcggtaggctttcatggcatggtctcaaactactgtttcgcaagatgagaacagggctttgaaaaggttcgatcaatccagctttggtttaagatatcgattaattctctacaggttcaaaacccaaatgcagcacgttcaaaattccgaagtcaatgtggaaaacaaaaagaagcattgtaagtatcttgtcctcgtgacttgaaaacaagatctgtttgctgatctgtctaaagatgaggaagtagtaaaggctttccaaaatgcacttgccttgctaaacgatcaaatgaagatttgagcaaatgattgacacgatatttatgattatgagtttatgttaccccatcccttctcatctgaaaatcgatcttcaagacagaaattgcaccagtatgcaagaagctatccagtgtgtctcacctacgatggcctaaaaagaaaaagatcaaatcattgaaaaatgaatgtactacaaaaagagacagttgatattatgggagtcatccaaatgggactgctaggaatatcaccaatcattattgcaggcgaaagagttacaggttggtagtctgggagaatacgaggctctggactctagtcactatcattttaaggcctcggtgattattcccgggggcggtcactccgggtagctctccctgtgatatcttgccagctggcgttgaagcgtctgccggtgttggccaataaaccttcctcctcagcttcctctgcatcgtcgtcgagttgcgcttcatccaactgaggtgaacggagaagggaagtaacaaagacaattagatataagcctgtgatgttggtgttagataaacgcgaacatggaactctggtaggaatgcaacaagacaagattgagacttaccgaggaagaagaactgagcccaaaagaacaccactccaaagaatgggtagttcagcgtgacccggttcaagaaggtgctcacgacacttggtgtgcagacttgctgcgcagcaggattcttcgccaactctgagcatggcttgataagttctttggtgtttgaacaatctggcattccaatgaaagctcccggagcgcgatcgcagaatgtctgtggcccaaatgtcgcatactggggcgcgactatcattgaaatcgaataattcagcgctaaaatgatcagcatcaacatggcggtggccaaaagtagagcctggggagatgtgtggccgtttctgatttggaaaatcctgacccataggaagcggattccgaccacggcgattccaaccacagaactgcagaaaaatagcaatacaagtgcagtaaatatggcatagtcaatgggaaagaacctggcagatttaacaagtgcccagttgacgggattaaagatgttgacatgtgcgaggatgtatccacaacgatgcttgcaaatcgaattctttgctttgtcaattgcggtcaagagcatggatacccacgttaagaaagcaatgaatagcagcaagacgccccccaggagcttgaagggacggaatactgctccaagtttgtaccatgcccttatcaaccagctgcggcctccgccttgggattcttcggctaggcgttggcgccgaatcagggtcctttcttcccgcactagtgtatcaagttctcgacgatctttggaggacagaaggtcgggatctccggcacatcgtccctcaagctgccgttgccgctcctggtttacgtcaagttgttgtgtggtgctcgctcgcagggtagcactagagattgatggtgcagtcttgatcaaactgattggcagaagggccagtcccacggatgtgtataagacataaagacagagcccaattgtcatcaacagaccgagagcaaaagtgagagcgcgctccccatcttttcagagttatgtcagcttcacatttgtgttacacgacagaatactcgaatactcacgattttcagtcagtaagcgcctgaagtaatccaggtccatatcattctttcctcgtgacactgggacgaagaagccaactaagaacaagatcacgacgactgcaaagaatgagagagtgtatttgagggcaccccaaatccgttggcccaaagtttggtccccctcctcggtcgcaacctcatcatattcctcataccagaaatatgtgaaggggatgaccagaagacagagcaaggcatccaaagagtagagaagatagtagatgatggtcaaggaataagtgattctgtccaccacatcctgtgttgcccagtcctttcgctggcctaactcggacgatgtagtcgatgataccaaagcgacatcgacaggcagcagaagcactgttgcgagaagactagtaattgagatgatgcaagccagagtgactgaaggagagcggtcacggggagtttggtagacgtagataaacactgacgccactgccagtagaatagctaccaccaccccatacacagcccagatgagggaagtctgaaggagtgccatattgaaggatagcagttcacactatgcagattgaggtctgcatcaacactcctagcaaaatactaaaggaatgatgcgaggaatgaaacttcacaaatacaccaaatatcaaaacaagaaaaatgatcttcccttccggaagctatcgcctgtgtcgtcattgatcgtctgacgctaacccattttgaggcatctacagccaagggcggtatgatttatccagcagaatagattgaccgcttaattctgccaggccagtcagctgacccgcttctgtctccgctttgcttccgcttcgaaggagctacaaacttcactgcacaagacagagatcaatctggatcttgatcttgatcgcttctcgtgttaatattgaaacttttatctgtgtcatctctttttttttgcaaagctttccattcccagttttccccctaggtttgcaattgcaatgtgcatctcaggccatatcaaaaacacaatttagctcattagcggttctctagcagtatcaagcctttcacgagctttgtcggtggacgaaaacttcaaatgcagtgctacacggagcttttaccccctacgggggtcacccatgctttggcagttcctttcatctcagcaaccaccagcaatttgattgttgtcagaacctctctattgcaggttttctctctcgttaaggtcacctcctctcaaccacagacggaagattcagagcctcattcttcacaattttctcagccagaaacaaaattagtactggaaaaagaatacccgctatccggaactgtgactgatttaagccgagtcaaaatcttgaataccaagagtggcggagaagccatattgattgcagtccgcaatgccaagcttagcttgattgagtgggaccctgagcgtcatggaatctcaacaatttccatccattactatgagcgggatgatctgacccgcagcccctgggtgcctgacctgagccggtgtgggagcattctgagcgttgacccaagcagtagatgcgcggtgttcaactttggaattcgcaatcttgctattttgccctttcatcaggcgggcgatgacttggtaatggatgactacgattcagagcttgacggagaacgcccaacaaatcagaactctggcggaggagcgcagatcgagaatggcaaagaagaatcagcacaccaaacaccctactcctcctccttcgtcctgccattgactgccttggatccttcattgctgcaccctataagtctcgcgttcctatacgaatacagggagccgacgtttggtattctatattctcaagtcgcaacctccactgctcttcttcatgaaagaaaggacgtggtattctatgctgtgtttacactggaccttgagcagcgagcttcgaccacccttctttcggtatctcgtcttcctactgatctattcaaggtcgtggcactcccacttccagtaggaggtgccttgctccttggctcaaatgagattgttcatgtggaccaagccggtaaaaccaatgcggtgggagtcaacgaattttcaaggcaggtttctacattttcaatgaccgaccaatcggacttggcgttccgcctcgaacgctgcgtggttgagcgacttggtggtggtagcggtgacctgctcctggctcttgcatccggcgacatggcactaatcaaattcaaacttgatggtcgatctgtctccggtatcactgttcacccccttccagcgcatgcaggtggagatattttgaagtcggccgcctcatgctccacctgtctcggggatcgaaacgtcttcatcggcagcgaagatgccgactcggtgctcctagaatggtcgcattcatccgcctccactaaaaaatctcggcttgaatcaaaacaagcagccgatggtcatgatgatctgtcggaagatgatgaccagatggaggatgatgacctttattcctctgcgcctgggtcgacacaagtcgataatcgcatgggaaccgacaactcaacccccgaattttataactttcgactgaacgatcaactgtctagcattgggccactgagggacctcactttgggcaaagctttctcgaatacgaatggcaaaagccaatctccaagtgaaaccgttgccgcagaactggatttggtggcatctcagggttcagatagaggcggcggcttggtagtcatcaaacgtgaaattgatcctttgactatcatgtctctgaaagccgatgatgcggatggtgtttggtcagctagtgtcacaaaaaagagaggagctcccagcacagacaatccctcctgtcaatatgtgattatctctcggcctacggatttggagcaggaggtgaacgagctcttcgtcgtggaagaacaaaccttgaagcctttcaaagcacccgagttcaacccaaatgaagattgcacggttgatattgggtctttggcagggggtactcgtctggttcaggtcctgcagaatgaagtcagaagctacgacataggtacatttcaatttagcgtgctagcaaacattgcataagctaattgtgaaactctacagatctcggattgtcacagatttaccccgtttgggatgaagacaccagtgatgagcgtgcggctgtgagcgcaagctttgtggatccttatcttgtgattattcgggatgattcatcggtattgcttctgcaggcggataagagtggtgacctcgatgaagttccgctttcagatgagattagcttgtcacaatggcgctccggctgcctttatcacgataattcacagtcattcagcgttgcaggctcatcgtcgaaggactttccagaaggcgaaatgattttattcctattgaatctggagtataagctatcggtaggtcgtcgcgaccaggaatttcaggcgttggttctgacttgcaatacagattttccgactttctagcatgaagttgatcgcgataattgaaggcgtcgactgcctaccacccgtattatcgaccgagccgcccaaacgatctaatactcgggaaatactgacagaatttgtggttgccgatcttggtgatagttctagtatttcaccttatctgattgtaagaaccttttgtcagtccatcgctttctctgctctctgactcatgcatttaggttcgaaccgaaaatgacgatctcgtgttctacaaaccaagcctaatcccggcaaaggctggccatgagtcgtctcgtcgcttgcaattattccgagagtcaaatcatgttctgccaaaaagttcaggggaggtatcctcccaaatacagaagcaacagcgattgagaccgctgagggttcttcctaataactcagggtttagcaccatctttatgccgggagcttcatcaagctttgtctttaggacagcaaagagctcaccgcacatcattcgtcttcgaggaggctttacacgttggctaagttcctttgattcggccaacactggctgtgaaaatgggttcatttacgttgattctcaggtaaggttcttcattcggagttgtgatgccatgtatattcactaattctctctttgtagagctgtatccgggtttgtcaactaccttcccaaacccaatttgactatccgtggacattgcggaagattccaattgaagagcaagtcgatttcttggcctactcgacgtcttctgagacgtatgttctcggcacaagccatcaaggagacttcaagttgccggagggtgatgacttgcaccctgagtggcggaatgaaggttcgtgtttgcttcaagcgtttcccatcatgctgtgctaatttaatcctaagagttatcattctgtccgaaaattcccgaaagtagcatcaaggtcgtcagtcctaagacatggaccattattgacaggtaaaaacgcccacaaagctcgagtcatgacgagtccgaatactaatatttatagttaccctctggatcccgatgagcaggtgaccgcggtgaaaaacgtgaacattgaggtctcggagaatacgcacgagcggagggatctaatcgtcgtcggaacggcgattgctaaaggggaagatatgccagctcgcgggacgatctatgtctttgatgtgatccaagtggctccggaccccgaaaagccagagacaggccgcaaactcaagctaattggcaaggagtcagtgaagggtgcagtgaccgctctgtctggcatcggtggtcaagggttcataatcgtcgcccagggacagaagtgcatggtacgaggtctcaaggaagacgggagccttcttcccgttgcatttatggacatgcaatgctacgtcgatgtcgcaaaggagctcaagggtaccggcatggttatcctgggagatgccgtgaaaggactctggttcgccggctactcagaggagccatatagaatgacactcttcggcaaggaccccgaatacctggaggtggtggcagcggacttcctcccggatgggaacaagctgtacatgctagtcgccgacagcgactgcaacctgcacgtcctgcaatacgaccccgaagaccccaagtcctccaatggcgaccgactcctcagccgaagcaaattctacaccggtaacttcgcatcatcggtaacgcttctacctcgcacagcagtttcatcggaactcgccgagtcatccgaagaagcaatggacgtggatgagaccttcgccagacatcaggttctcatcacttcgcaaaacgggtctttggcgcttgtgacatcagtggctgaggagacataccgtcgactgtcggcactacagtctcagctgatcaacaccgtcgaccaccctgccggtctgaacccacgtgctttccgggcgattgaaagtgatggcgctgcgggccggggtatggttgatggcaatctattgcgtctatggctgaatatgggcaagcagcggcaggctgagattgcgggtcgggtcggcgcggcggagtgggagatcagggctgatctggagaccattggcggtgatggactcggctatttatgatgccggcaacagacgcctttcggtgcattagtttagagggaaattccaaaaacggactcactgggtgagcttactcttgcagtttgatcctatcatgtctacgtctccgtaagataaaagagaagggtcagcccaagataggatttcaatatattgatggcacgagaacatgtatagctgaagttctctcggccacaagatcaagtaaatagcgtaatatcataacacaatgggatataactaaaccacacaaaaggagacacagatagaaaaaaaagagaccccagtgccaatcccaatccagtccaacgtgggtaatccaagtaaatccaagtaaatccaaaaacccagccaatccctaaatccacaaaacaaaagagataaatcaagacaaaacaccgcattcgccattctcgccttgcacgattcgaattcaaagataagaatcaaatgcttgaaatcattcgtgcctcccatgagcatcaatatcagtaacacattcagcatgtcagcttggagtcaaccatattttgtgcttcgtgttctatgggcaaacacaaagccaagtctaaaaaacgtcaagaaacaccaaccccagggtgataatgcagatgcgagaaggaaaaggacaaacgccactcagcgccattaccccagcatcccagtgctggggagtttagaacacatcttctgcggtaaagtaccgcttattccggcctctggccacaaatttcatctccggcatgttggtgtgatgcactacatgtggtcgatagacagcgtcgacaggggcttgccattcatccatgccgagggggaagtactcatagagaagatcatcgttttcgttcgggaaggggagcgacgatgcgaatgactggggcaggttggcagtctctagcaagggcatagatgaagcaacgctccgcgagggggtctgggagacagcatgcgagagcttgcgcatcttagaaggcgggaccgactggtcaagactcagggatcgctgatgtgacaactcggcagcgaaaggggacaccatcttttgctcaagatgaaggttatggtcaccgctctcttcctcgtctagcaatgacagattgatcggtgcagcggccgctgtcgtggaattgactcgacgatgtgagtcagtcgcctgggagagttgctccgggctggattgacggaacatggacttcggggcatgagacatgacattgttcgacgtggactgtgggataggggtccaatccggcgtcgctttgctctgctgcataatgctcggcgggggaacagacgttgtttcaggagagctgctctgcgcggctgtcttcgtcttggctggagtcacgctggcacgccgcgggacggagtcgctggttggcgtgcggttcacggcggaattcgaggagttggcctgattcttccgggaagcggccgcactcccactgagggggagatctttgcgtgactggaagttgcgtgggctgcggccacgaacgatgacggggcctgactgtacctcggagatggagatcttcgcacccgtggataaagtcgcgaccaccttgagtcggacgacgaagtgttgctgtagctcctttcggcgaccattgttggcggtcgcaacacggaattgtagacgtttccaagcgatagggaaggtagcatagtccgagtccagatcctgaccggccatgatgtccaagggaattgggggaggctccttctcgatcttagcgccagtgctagggttgttctcctcgggcgccgtgccagaattagcggccgccgctgagggggtcttccatggcaccgagataatcttcaccgggtttccctccacagattcggtggctgatacggtgagttcctgggcgaggatgggaattcgatcgccttggtcggtcatgatatagcgcatcccgcgaggcaaagttaccgagccggtaatttggaacaaattgcgacgataacacgtcaactcggcaccttgttgcggcggggcattttccgaaggggatgttgtatagggggactcggcgagaaaaaacatcccatgtaactgggcggacaccgataaggatgttcggcgcatggaatagtcgaggagcgtaaagtgatacaccggtagcgaaaagcttagcagcttgttgttgtggtcgatcgatgagtcctggggttgttcctggggcgctgggtcaaagggcgccaccatctcggtgaaagggtcatcgtatgcggaagagaaacgcctcagttgatgtgccagagtaggaggcgcgaaggtagcgagatcctcactaatgtataccaaattagcccaaccatttcccagtcgggcggagtggatgatccacccctctcgtcccacttggagatcttatcacccacctaacaaaggtctcggaatcgaagttggaacggtgatcgggtagatccaggccggacatcgcattgagatagtcggtactctgcaaattccccagggacaatggactggccatgtatggtggcatcgccatagtgtcgaagccctccatggtaagaggtgcgatacggagacacacacccgtagacgatgcggggaaggaagaagtataggattgcctcttctatataaaggcagtcgaacgagagacagaggagaagaaggaagtagactaaagggaggaaatagacaagagaaagaggtgagacgaagataagccaaggacgagtaggcaagacctggggaatgctgcaagcaacggagcggaaagataggctaaggcgggagtgaaggcggagaggacatttgagacggaaatggaaaggtcagtggagagcgaggagagcgaggagagggaggagggcgaggtattagacggaggctatagaggaaagaaagaagagcaagtgaccagagccgggagaaagagagaggaatctcgacctgcacccaaacgatcaacggattcggggaatagtggagccgcggtttttgcggagaacgaacgcagcgctgagtcagtcaccttattatttgattttatagaaaaggttttattaatgtttaaatgtttaatgttttattcggaattcccttttgattaatcggtttaatcggttttggatacagagtacggagtaggacggagtatcgcaaacgctcatgaccaatggcaattaatatccaaatccctcagcaccgatggggtaagacttgatcgccggctctcggcaatcattccccccaggccctgaagatcaaggtgttctttttatatatgatcactcccaatatagcattcattgtccacggagtactccgtacagagtacatcttcggatactacaaggacaggtaactaactataacctgagattaaatccactttaatgcatacccacctgcctattaaggtactcctgcttcgggtcccccctcctgaaaacgccacatattaataatattatcattttcagtaactcactatccttggattaggataaggatgagtaatgatgcaccttgtctgtataggtttgactagattaatagttgtctatactcgcagtattccaatcaagccatgtacctccaattgtatcacttaatacgatcataatcgcctcaaggatgatcatcatcggccgtctgacatgcatctgtaggggccaacagccatccaatcagaatatgcggcgcattggatcagaaagcggtgccccccgtacggagtactctgctggaccctgtactttggctatgagcgccccactgaaaacggcaatgataatctgcaatctgcaatctgcaatctataatcggcaatgttatcatgcatgtaatacttagataagtacactccgtacttactccgtacggagtaatacttgtagatagtgcccaatctactccgtaccgtaagtacctgcacttttttgttttcttctctcgccatcgagatttaaataaaataaaatccattgtggaaggagatacaacatacagcctggtccaggggatgtcagacggtaagagagtggcgagagaaaaagagaagcttccgcgggtttcgcatgtgagccaatggagaagtctgtgcatttacccgattcgattattaccgaggcaattccttctaattcttcttccggcacgtttcccgatgcagcctacaaagtataccaaggttctgaccacgggagccatccacggacatgacgtcctcgttccaaggttctagccttcgaaggttcgaaggttccaaggttggaagctccagccctgggctttcaacggtgccgattaacctttgggtttgggcctgagatcccgaaaagcttcatacaatatgtactgtactccgtacctgaaagatctctctgcaatattccggggggtcggagaccagaaatgtagaccttcacaacataacagacttccagttcagtttcagccaaaaaaaaaaaagagagagagaagctccgcttgtacaaccgagggatttttgacgcaaacagaaaactaaattggtttgaaactctgagccaatgaaactcatttgcccgggtcaaagtttggacccaaggcctgaggaacccgtttgggggttcgattgttgggttgtatacggaggaggagtacggagtatagaaaattagaaaatatagaaaacacattgaagagagagaaatagtctctttatatacccattcccttctaacgtcacattggaaatgacaaagaccaagacacaatactccccaacacagaccttgttctttttttcttttacctaaagtgcgccaaagcggagttccgttcgaagccctaaaacccagaagatgtgcctgtgcgaaggacgtccaacggagctccggaccaatcagagctcggggcttaattgtgatgccttgggaaagctaaagggaattagaattaatctcaatttccccacaggttgaatgaaggaactgatagccgagtatatttgtatacatataaaatacatacagaatatcccaattgcagttctatctgtgtatgtggtcagagatgtatttgtttggaccagatgacgccaggactgactttctgtcctaccccggacctaactgcccaagaatcaaagatgtgtgaaaagaaactcctcggaagaaaccgttactggatcgggtgaaacaaagatggaggaaatggagaagaaacagaaaactggatagaatagatcccaaacccaatgcgatatggatatcataaacgcgaacagaaacgcaaagagaaagaaaagcagaatcgaaccaagttgatcaagagtcttctacgcgtgcatcatcgtccacgaagcggcgtcacagttcacttcctcaaaactatgtagcatagtgaagcccatcatcgagagattgtcgaagttgccgtcaccatcgacctattccagtgttagaagataaccggggaaaaggaacaagcccaaaaaaacatacacagtccataaccacggcatcggcactcagcttccggatctgcttgatagctagcaggaccaggccctgcattaccgtagagtaatgttcgccacaaggagaaatcaccggagacgaaatgcctccgacggaagcctgggtggcgcgcaacacgggcatgtgctccgccaaagcggatcgctcattgtaaatcacgatactcccgagtataaccccgtcggagggccgcttggcccggatgatcccgcaattaggcgccccgcccagagccatgcggtagatgtcggccacgccctgccgcgcatacgttttgatgtggtcgagaatcgcgggcgcaaagtcccagccatatacgagatcgtatgtgacctcggcattctgcagagtcgccgtgagcccctcgggcggcacccatgtcgacaggttgcgcatgatcacgctgcacactggtcgcgaaagcgccgtgttccaccccatgttcgcgaaccactgccgcagccgcttgcgctccacagggttgacggtcgggatgccaaggtagatccctggtaatcgggatcctagctggaagcgtttcatgccggtccgctggagcagagtccgaatcgcgcggctgtgaagggaatgtccgattgagagtttccttcgagatgggtctacgatcagacatgcaatcacaccggtgcccgtggatcgaaagaagtaggtcgcgcagaacccgtagagggcatgcgtgctactgttccggacaacaaaatgggcttcgtcgatatcctccttccggagcaagaagctgctagcggtagctccaagaagttctgacggctggcctagtgtacagtcgacacggatagtgtcgagcagggcatccagcgcgaaagagtcgcgatcctcgttccaattctcgacaagccagtgctgtcgagactgatgaatcttctgcgttcgcccaatggagccaggcagggccgctgaaggtgtcaagtcgccatacaagaccttgaccaatgcctggagggcagtttccgtgaagtcatacgtgcatatgtaagtaccaattgaggaatccatggcaaaatcatatggcgagctaactgccaccacaatcaatggtttcgcgcgacgttcgccagatggggtatactgcgattggcagatcatggcgacgtgttttgagaacccttgctggtagagattgcgattggcatcggccgtgacaactactacagcactcgctctttgaatgaggtcgtcgtggatgggacgcacgccattggaagtataggaggtgtgcaacacgcgcccgttcctctgccgcgagagtgatcgtccaagttctttgaagaccccctctccactcagaatcgaggaggttcgttccgagcataatggatccagtgacccacgcgcagactctgcgaccgagagagaaaccgctgatgttgggaggggcttgaccagcggcgtcagaagcaaaagttcttcgtctggctcgatgacattggacaatggaagtaaattattcttatctctcatcactgtgatggaagagttgtaggctcgggtggaaaggttggtatgcgagggttgcatctgcgtaagtgaagaaagccccggagggttcagtgcctgttcccacgaagtacaccgcgccttcaaatccaaaacgcggcgcaacgattgttcaatccgctgacggctgatgataccgttctccacgccgagtttcaacccgttgatagcttcctgttggacggggaatgaccgacataaaagcatgacgtcgcagccggcgttcttcgccatcactgtgccacctcctactccaatgttatgtgtgagcgcctccatctccaagcattcggaaacgaccaccccttgaaactggagatcctttctcaatagctcgttaaccacctgatcactcaggcacgcgtgcatcacgttcatcccagccgatgacaatgagacacctcccactatcatggcatccaggccctggttgatagcgttgcgaaagggcacaagcgcgttgagactgagttgctctagggattccgtaataattggaacatccgtcggggagccgagaaattccaaattaccataggacggaaagtgttttccacaagttactaaacctgcttcttgataccctttcatgaactggacaccatattgagacgcctcttggggatcgtcgccagcggtacgaacgcctaatggttgatttcgcacattggtcaaaacatccaaaacggggcccaatatccaattgaccccaacggccttgagctcctgtgctgtcgcgacagccacctcgtgcgctaatgacttggacccagtagctgcaatgcccatggtactagggaattggcggatatagatctcatcatacaaactgttgacgccaccattctcctgatccaaggcaattagtaacggaacaggatggcctgcatcacgcgcaatggtctgtaattccagaaccaatctagttgcatcctcggccgctgtaaacgtgtcagtgactgtctaagtagctagtgacaaagggcctttttaaagatacatttcaggtttttagcagatagcatcacggtacccaagtggtaattctcaatgagtgatcgaatctgtggattgacctcagtcccatcaaagcccatcataaagagctgacccatctgtctgtgccatgtcagcgtactccggtgtcaaatttcctaaagtggaaatagtctacatgacgctctccagattgacagttaggttccacattgaagggagataccccaacaggcagattttagggggggggaggaatggggcgagggttaacgccaataggggacgagccaagcgaaaacagtagatcgacatacctatctaggtcctcccagcccgggggcagcatgccctctttccgggccatggcccgaggaggaatgcctgtagcggcccagagaggtaggatacagagggtgcagtgtcgggggatccaaggtgtggacaccgtaaacgtctgacgggtacggaatatgaagccagtgcacgcgtagtcaggtgacaagggagggttaaagggttgcaggagtcaaaattggacctcgggagctttgtctttctcccccggagccgcaaatgttggggaagagtcgggaccagagagataaggcgagagataaggagataggagcttagtattccccgctgaagggtcacgggatcttggcatttctattatgtacatagttatgtaagatttatattcagagcttggatattcagagcctatgacctgggaggtgtgaatataaagaacacgatttatagacatacatctacatagttatatagcgtagatgattgacacatgagaacatttcgatccactctgtatacacccgaagaaccgtcacgtgctttgtatgtaaccgtctccggatccattccccatcacgtgccatacataccaataccaataccaataccactgtcatacctgcaacggctacgacgctacaacgtccaaggttgcactgaacacgatattctccagcttcgtaccgacaccaccggatgcaactcctacacttcgcaatggaaccttcaaaccaccatgtgggctatggagctccatactccaatcacaacgcccacgtccttttttttccggcgtcatgtcactttgggcttgattgttgagccacatggaatacacccgagtggacattgataatcaacccgtggaatcggccgaatgaagtcaacggctatctgtccagggtgcggtagcccgcagacgtcaaccctctagttagataggggcaaccgtcttgcacgtggctttctatgcgacgttctttgctgtcactgtcgtacactccacccagactgtaacccataggattcctttaaccttatcgaatggtctcttttccttcctcttgatgccaactttctcctcttcctttcttcttctcccatactcctcagccctactccaatccaaagacccgtgacgtaattatgtgtgtgacttcttctgtgtgtcgccttctggttctatactaacctgcttctcgataggcgtgtcattatcagagaagatcctcgtgatgtgtctgtatacattgcagactacattatcagtaagccgcagccgagatcctcgatgcgcgaatgctgagactaactcttccaaggccgcatcaagttgtttagcccgacgcccgagcagccattcgtgcttggtctgcctactggcagcagccccgagctcatctacaagatcctcgtccagcgtcatcgcgccggcgagatctccttcaagaatgtcgtgactttcaacatggtaggcgcaaaaccaatcacggggaaaaacagcccactaacctcaaatacaggatgaatatgtcgggctgcctcgcgatcaccccgagtcctaccatagcttcatgtacaagcacttcttttcccacgtggacatcccaccgcagaacattaacatccttgacggcaacgcgaccgatcttgtagccgagtgtgcatcattcgaagcacggatcgcgcgctacggtggaatcgagctcttcctgggcggagtcggaccagacggccacatcgccttcaacgagccgggctcctcgctgaccagtcgcacgcgcgtcaagacactggcctacgacaccatcctggcaaactcccgcttcttcggcggtgacacggacaaggtaccccgcatggctatgactgtcggtattcaaaccatcatggattcccgcgaagtggtgattgtagccaccggagcgcacaaggctattgccgtgcagaagggcctcgaggaaggcgtgaatcacatgtggaccctctccgctctgcagctgcaccagcacccgctcgtcgtctgcgatcgcgacgccactctcgaactcaaggtcaagaccgtgcggtacttcgagtcgattgagcaggccggcaccgatgcccgcacccagggacccgctctcgtttaccgtcctcggacctacgtcccttcccctgtacaagttaagacgcccaagtcccagcagcctactcccgatggcactcccgaaaaggtgcccaaggacctccgcatcaacactgagctgcaccgccgcgcactggaggaagaggagctcaccccagatagcatgtcctcgcgcctggtcgactcggccattggcggtatcgacggtgcactgaaaggagaccttatgtttgaccgcatgggcaccagacttaccacactctgatgggaacacctctacacttttggcattttaattcggggtttttcttttttttaaaaaaaatctttttgtgagagaacaggaatatggattctgtctctacaaatcatatatgcatgggtctgttttactggtttggcttacaggaaccatgggtgttatttaaggagtttcgctggtcaattcgattattctcgacttgatagatgagatgcaatgcgttttctaggaatcagtgatatcaaacatttagctatgataatttaaagtgtgtacaattaatttaaattttcttgtttatgcgtatcattcaggatatatatactttaaaaagggcaccttgacggtgtagactttcagcgcggatatatggttatagatgctcgagtaatagattaaagatacagaaagaactagaatatgcttgtgtgtcgctcaaattgtatattctgtacattttattctccttgcttttgggtcgtactgcatgatatattaacattatagcttggcgaagacactgaccacagtaccgctcatatcaacaagagtgctcttgttctgcagccaagcctcaataccgcggcgaccattctccacgcccagaccgctcttcttccagccaccgacggccatctcagcagggctctcgccccacgtgttaacccaggtaataccagcctgcagctggtcaatgacgcggtgagcctggttcaaatccttagtgaagacaccagcagcgagaccgagttcagtggtgttggcgcgtcgcacggcttcctcgacggtgtcatagtacaggatggacataacgggaccgaagatctcctctttaacaattgtcatggagtcagtgcaatcggtgaagatggtcggctggacccagaaaccggcctgcagatccttgggcaccgagggcttctcgacaccgccacagagcagggtggcgcggtcagactcaataccgtggcgaatgtatgcaacgaccttgtcgtagtgggctttggagctgaggggaccgaagttggtctgctcgtcaaagagcgggccagcccgcacatattggatcttctcgagcaggctcttctcgaaagcagccttcatggtgcgcgggacgaagacccgggtgccgttggtgcagacctgacccgtgctgtagaagttggccatcatggcgccattgacggcgctttccagctcagcgtctgggcagacaatcaagggactcttgccgccgagctccattgtcacgtatttcatgttgcccgaagcagtgcctgcgaccttcataccggttgccacttggccggtgaaggagaccttggcgatgagtggatggccagtcagataggcgccgacatcgccggcaccgttgatcacattgaagacaccgtcgggaaggccggcctcggtatagatttctgcaagggtctgaccgtgaagcggggtgtattcactgggtttatagatcattgtgttaccggcggccaaacaagcagcagatttccagagggcactaaatatactagtcagcttttttttttctctgctgttgcaagcgcaggatcggggaaattacatttggatggggtagttccaggcaccaatgccggcacacacacccagaggggacttcttggtgtatacccaggcatcctcacgaagttgagtggtttcaccgttcagaccaccgccaccaatgaagttggcatagtactccaaaacatcggcgccagtcgtgacgtcgacggtactagtctcagtataagccttgccggagtccaaagtctcgacgcgcgcaatttcatcgttccgctcccgtagcagtgcagcggccttttggagaattcgggcgcgaccaatcagcggggtctgcgcccacgaggggaatgcgcgatgggcagcattaatagcggcatcaacgtccgcgttggaggcaatctggatgtcggccaacggagttgccgtggcgggattgatagtctggaatgacttgccggaggtcgctgcttggaccttaccgtcataatagagctgacgaggagggaaagagagcgacatgattgtgtatatgattttccagctatgtagaaagctacaatagaagataagagaggcggaaataacacacaccgccttagaattccacaaaagggaaaaagcggagctatgtaatcctttccggttttatgtactcggtactcggccgcatagcataactagtacgtaacagccaagtaccaagtacgccatccccgtcagcggctgacggtggctgaaacggcatcgtcctggcgcggggttgttatcttttggcctttgagcttcttcttgctctctccggttagaaagtccccgggaagttcatactaagaaaggcatttcttcgccagcgggaaagtcgacgtactctatctacggaatcgcgcatcggaagcgaattcctatcatggaccggcctcctcttttccccaatctgccgagattaactcgaatgcaggaagtatgccgataaagggctgatactcggctggtaagagtcggtggacctcattatccggctcatctcgacttctctccacttttagtgatcgccaccactcagagaccccaagattcgctgagtctgacggaaagaaaaaagaaaaaaaaaaaaaaaaaagcccgaaaaaaggtttggacgaagctgagcaatccttggagattggatcgaaaggttttatccgatcagaccaccctccgaacagtttggatatttctcttttagagaccgtcctttcttctccaatcttctccaaacattctcctcactatatcggtccttgcctattcccccggtattcaatatggccaccactaacgagctcctcgccgccgatgttaacagctacgactacatcgtcgttggcggcggtaccgccggctgtgtgattgcggctcgtctggccgagtacctcccgaacaagcgcactctggttattgagggaggtcctagtgatttcatggatgatcgcgttctgaacttgaaggaatggctcagtctgctcggaggcgagcttgactacgactacggtactactgagcaaccaatgggtaagaaacttatcttttctaaatttctaaaagagcttatgctgactatccccgaaggtaacagtaatatccgtcactcccgtgcaaaggtcctgggtggttgctctagccacaacactctcatctctttccgtcccttcgagtatgattgccgtcaatgggtgtccaaaggatgtaagggctgggactttgagacctttacccgcataattgataacctgcgcaacaccatccagccggtgcatgcccgccaccgtaaccagctgtgcaaggactggatccaggcctgctctagcgctatgaacatccccgtcattgagaacttcaacgatgacatccgcaagaccggtgagctgactgagggtgtcggcttctttaacatctcctacaaccccgatgacggccgccgcagcagcgccagtgtcgcttatatccaccccattctccgtggggatgagaagcgtcctaacttgaccattctcaccaacgcttgggttaacaagatcaacattgagggtgataccgtgaccggcgttgatgttactctccagtctggtgtcaagcacactctacgtgcccagaaggagaccattctgtgtgccggggctgtcgacacccctcgtctgatgctgctctccggtcttggtccgcgtgagcagctgtccgcactcggcattcccgtcgtgaaggatattcccggtgttggtgagaacctgctagaccaccccgagagcatcatcatgtgggagctcaacagccccgtggatcacaacatgaccaccatggactctgatgccggtatcttcttgcgccgcgagctgcccgacgccgccggattcgacggcaagatcgccgacgtgatgatgcactgctaccagattccgttcaccctgaacaccactcgcctcggttacgacgagcccctgaacgccttctgcatgacccccaacattccccgtccccgctcccgtggtcgtatcttcttgacctccgccgatccctccgtgaagccctcgttggacttccgctacttcaccgaccccgagggctacgatgccgccaccatcgtggcaggcctcaaggccgctcgtgagattgccaagcagtcccccttcaaggagtggatcaagcgtgaggttgcccccggccccaaggtgcagactgatgaagagctgtccgagtacggccgtcgtgtcgcccacaccgtgtaccatcccgctggtactaccaagatgggtaacgttctcaccgaccccatggcggttgtagaccccacactgaaggtccgcggcctgaagggcatccgtatcgccgatgccggtgtcttccctgacatgcctagcatcaatcctatgttgacggtcctggccattggtgaacgtgccgccgagctgattgctggcgaggccggttggtctcgcaaccagcctcgtctgtaaagtagggcttatgacgcgtcaaggacctgatatgtatgtaaaagttgtttctttagtttggtcttaatttggtgttattatagcataggagcgagcggcgcagggcgcggaggatcgcctttgaaggcatctttccgagtcttattctccccagcgtctgcgagacagacctggtatacaattggttatggatgaacttgatatccaagaataaatttcttatcacaatttttgaaattgaaaatctaaatattggaactgaagatggatttcatgttcaatgcaaaaccacctcaaaacgcctataaccaagatgaaagctatttaacatgacagcaatataaaaaaaccaagaaacagatcgcatctaagatcgaacaccttataccttcacagcgcccttatcagtatcgtggatcttagcacccagcttccatacctgatcgactgtcaaggtcggcccagtgaaggcatcctcactctcacccaatatgatgagatcggcatcagcaccgctttctaacgtccccttaacaccctccaagccaagcagacgtgccggcgcagcagtgacagcattgatcgccgcagccgtcgacgcacccgaccaacgacggaagttgttaacacactcgataagcgtcgctgaagatccagcaatcttatccgagccctccagcgtcaaccgcgcaccgcttttaacaatccgttccccattagtccactcatagacaccgtcaggcagaccacacagacgcatagcatcggtaaccaagatcaatccatccgggtgcgcattgtacgcgatcttgatggaagtgggatgcaaatggatgccgtcggcgatcactccgtaaaacggcctacggcgctcactctgtcccagcagaccgaagatacctgggttgcggtggtagaagggccgcatggcattgaacaggtgggtgaccatgcgggcacccttgtgcgtggctgcgacagcctgttcataggttgcatcggagtggccggtggagtagatgatgttgcgcttggtgatttcgggaatgtgggccatcatgttgccgacttcgggggcagctgtgatcatcttgattgggctggcgctgcccatgttctcttcgccatagcagtagatgatgtcgtcgaaggtttccgcggcgcgcagcacttcgggcttgtggataccgttgcggttagggctgatgaaggggccttcagcgtgtgcgcctagtgactcggcgccgtcttggggcttatgagttcctgctgtggggccgagggaggggaggacctgaaatatggattagtatttcttattctcttccctggatactttgcgctctgcttaccttccagtacacctcgggggtggagctcacgagcgtcggcaggtaagaagtgacaccggttcgggccaatcctcggtttaccatgcgcaaaccctcatcgtattcctccttcgtttcacagggtacggagaaatcaaagccatgagcaccgttcaactggacatcgatcatgcccggggcaatgatacggccaccgaggtcgatgatctcatcgggggacaggtgcaatccatagaaagcctcttgatccttgaggatctttccggtcagagagtcaatccatagatctcgctcgaccaagttcgagccgcacaccaggcgacaattggtgaacttggtaatgcgcggggtagaagtcttgcccggcattatgaatgttcttatcagatcagattaagttgggtagttcgagctcgagggaaagaatacacaagaagaagggggggaaacccaagtacataaagatctagacacaatgatgtaacagtagactgcgtgacattcggcatgccgatgtggtatacaacatagcccatagtaactgttatcgttgcttatcggccttatcgttacgtgtaatctcccgtacgtatcaatactcggcccgtaaattaccaaaaccggccttgacaataccgtcacggcccaactgctacactccgcatgcgggtcgtttcccttcccttctctttctcaatgcaacatctctcgtcgtcgcattgcaaagtggatgaacatgacatttcctattatattatgactcttttctaatttccctggtttgcgcttctccagatgactccatatttccatgtttccttatctcccttgacattgtcgcattgaaaatggttactaagatgaggcaaaccgggagactcggttaagttgcatattaatttatctactaaaagtccttagcttcgtcctagtcctcttcttatttagactttctcttggcaaagggattagctatctacattcttcaccattcttcaggctgtttctcacgtggcgaacattctttcggccccttggctcgcttgttgatcgctacagcttttttacccctgtagatctttgttctctacaaccatgactgagccggggaagcaaaaagctgagaagcacacggatttgccgacacatgcaatgtctgcgtccgtatctactccgcaggacccggagtcaggtgtggaccaggcagtgataggtcccgcttggatgtacaagccactattcaagattggcaaatgggaggcaccttactttgcctcacccgaaatgcaactatatttggtgtcatttgtctgcttcttatgtcccggcatgttcaatgccgttagcggtctcggtggcggcggtcaagtgaacacccacgatgtgaacaacgccaacactgcactatacagcactttcgcagtcgtcggcttcttcgccggctccattgccaatcgcattggtctaaggctcaccctctccgtcggcgggttcgggtactttctttatgttgcctcgctcctctcgtacaatatcaaccaaaatgcgggcttcctcattttcgccggagccctgctcggtgtatgtgctggtctgctgtggtgtgctcagggcgcggtcatgttgagttatccacatgagcatgagaagggaaagtacattgctatcttctgggtgattttcaatttgggtggtgtcatcggtagcttggtacgttcacttgcatatctcgaatcctcagaaacaatatattgatatccacagatccctctcggtcaaaatatgcactcgaccgccggcaacgtcaacaatggcacctacattgccttccttgttctaatggctattggtttcgttctctgctggtgtctcgtcgattgcaagtacgtcaagcgcaaggatggctcgcgtgttatcgtgatcaagaacccgacctggaagtccgagtttttgggtctttgggagacactgatccacgattcgtacatcgtcctgatgttccccatgtttctagccagcaactggttctacgcataccatttcaacgcagtcaatctcgcctatttcaatgttcgcactcgagccctaaacagtcttctgtactggctgatgcagatggtgggtgcgtttatcttcggcaagctgttggatttgaagggtctctcgcgtccgtggcgcgccaaaatcaactttggcattctgctcgctgttaccatgggcatctggggcggaggatacgcattccagaagcgctatacccgcgaaaccaagggtctcggcacggatttcaccgatcgcggctacattggacccatgttcctgtacatgttctacggattctacgacgccgcttttcagacctgcacttattggtacatgggttctctctccaacaatagccgcaagttggccaatttcgctggtttctacaagggaatccaatctgctggcgctgccggaatgtggaggtaagcaaccattgctctttttgctctattcttcactaactaacatactttcagcttggatgcaaatgagaccgcgtacatgaccgaatttgcctcttgctggggtattctggtcggtagtatgcttattgcctcacctgtgattttcctcaaggtcaaggacagcactgccgtcgaggacgatctgcgattctccgacgaaaccgccgccgacgtgcggggccataccaacgaaatgtctccgatagataagcctcacactgaaacccatacccctactgggactctccccgactctcacgaggagactaccaaataatgagttgtcggcgagggggacaacccttaccggtcatttatcaccactcggtcaatattcgatttgatcacctttatcactacagtgtgacgaaatacaatacctgcatttacgaggcgtgtgacttttttatgctcgcgaaaaaaatcctggccacaactgcgccagggaccgtgagtatcatgttcaacaaatactcaatctccgtcaactccgttttctttaataatcttgtacatgatctgcgttggatttctctgggtgcattggctcccattcgggttgtactttaggtctgccatggtcataggagtagtctatctaatgcgtacataatgtcatatctgcaaaccacaatgctattgaatatattatcaatatctaatcaggtctgctcacgacaactcaccaaacccagaagcctttgtagccgtaggcaacggtaccgaagcctgggtatgagtcgccgtcttagggccagtcgagccagaattctgcttcaccttgtcttctcccttggtcaattcccacccattcagagtacgattaaacagctgcaacgcagccaccggctgatagtacggcacctcatgaccagactcataaacacgggtgaaagagaagttaccatactccctcgtctcgccatactcgacaccatcgacgaggaagggcgcataaccggccttctggaactgcttgctgtgcttgtacttcgccgcgagggagatggcctcgccgccgaaccagttgcagatgtagtctgcgtcgccgtagatgagagcgacgcggacgggacgggagaggatatcctctaggtcttcgaggaagttgggccagacgaagtcgccggtttgctggaaggcgaagtagacttcgttgttggattgcgtgtagtttatgtcgacgcctagggcgttcaggaccgagtctttggcgaggtagtttatgtagtagccttctggggttgggtcgtcgctcgggtggcggatgtcataggcgcctcgctcgccgaagacgtagtaggggctctctagagttagggattgtgtcagttctgggtagattttatatggagtcggggtatatcataccgacgttatctcggcacatgttggttgcctcggtgcagagtgcgaggtcggatagcgaggtgcggtttgtaagcttgcaggttgcgatttggtcctggcagccgtttggcatttcgttggcgaatctcatgtagttgtaaactgtctcgttgacctgcattatttgttagtgtgaaattagtatcatggtaactttgaagacttacagccttgatcccataggtgttgttcacggcaaattcagggtagtgcctggcttgaattccttcatcgatgataccattgatgatacccaaggtgttgaagtcgagttgaatgccgtgctgggtgccgttggcaatcttaaggttctcttcatagaagtgatcgaagaactgccagtgttagaacttcaacaaaataggagctactggttgactcacggcagggccataatgccttgaagaagtcagcaaggatatatcaatatctcgaacagacgaactcaccctccatagctttcggtccacaaattgaaactcttcgacttgatcttcgaatccagcttgggcagaccacccaggaatccctgcaggacttcccaggtagctttggcagcgagtacagttgtatcaattgcggtagcgttgatgactggatagcgaccatcaattcctgcaaaggacgggtcttcatatgaacctgtgatagggttaagagtgccggccgctttctcagcgtaggagaaacctgtgattatattagccagatgacctagaaagagaatagaatagaaagatatccataccaacacccaatggctgagagatgaatagcaaattcgagacctcattccacgaattcttgttgatataagattcattattcttgttgacaccacacggacccaattcctcgaacaatccaatcaaagagtcactgcccggtccaccatttaaccacaaggtgattggcgcattttcagggtcatggcgagcctcgaaaaaccagaagaaagtgtgctctgtgggtgagaggtccacataacccgaataggagttgacaccgggggtagtttcacaaacaccctctttgccaggctctttatagcgaatggtgacattattagccgtcttgatagtcttgacgtgtgttggatgcttgggcagctggcgacggatgagggcctccaagccctccaagctatctgagggcacggcaagcgccgccacagccggtaataatggaatccagtgggagacacgcataatgggctatttgtttaccgttacgagtgaggattaccggggcgtgctcgggataacttatagtcccagaagaggggaagtaaacaagaatcgtgcatgataagcagctcacgcaatcgacgattggcagggaaagctgaatgctaagccgggtatttacttgatctccgtgggagctccggagaaggtagcatccccgttaagaggggaaaagagtcaaagctccaccaactcagggtgagaggttcagttattcgactaggttaggcggggagggaaaagatcgacggcgctagattataccctgtaggctgtgatcgaatagcaaaagaccagacatctccatgggctaatgccaagagctgttgggctccgagacaaggatgtcgtcttccgtaaagcaaactattatgacgtgctatgtttgatagtgtattaatgtgttgagaaagtagattgagtcatataaaggtggtattgtctgcactgcaggtggtaggtggtaggaataggcctcgaggaccgggttactagggttagtagaatccacctagctatgaacgtattgcggagagtgaaagagccaatttacctggcttgagtagagtgtcacagtaggctgtgttcacaataagcaatctatatagcttggccccatcactagcgaactcatctatcagatgccaaggcgtgttactccagagccagtcgttcttggataagtccgaaacaggctaatcgatagccttggggttttaaagttgacgaagcagaagtttatctgacgttttatatgccagatgggatagtttaaatacaagagtgcgatcaattcaagatgcagaagatgaggagagaggagaagtgggggaatatgtaaccggagttgaatgcaaaccaatcaaacaagcaaatgaaacaaatgaaacaaatgaagcaaacaaggcaaacaaggcaaattaaacaacaatccgtaccctattgatgatgacagtaaatgtaatcactccgtatatatatatatagttgtagttatgcatactaatatgattcgtatatatgattatgtatactccgtaaaaagccataaatataaagaactgttagaagcctgcatcagacaatcatattatactttaactagccaccggtttcaaaatggactgcttctagagttgccgatctcactcgagctagggttgccgataatttcctattattctctttctctaggactaaacacgaactgccccaatacccacatcctgccgagtctcgtatttgccgatttgccacgtttcacactcctaacaatctggatgtctactccgtactccgtacctagatagatgcctcacttggtagataactagaaccggaagaaccattgatgcgaaattaattggtctcagagttctaaagtttggtggtttgatttgattcatttcccgatgcattggtggatgataattggctggtttcatgtatcaagtgggaatgagtgggaatatgccgaataaagaccccctggctaccgcgtactaatactaacaagccccataatgaggacaaatagaattacgcagcaatttcctctcttctccgatacatctttgtcgaaaggggccatcagatcgtttatttcgctgggttacagtgtttcactggtgaaacatctccagacttcaatgttcccagagtaagtcagatccacttctattgattctctttctgatccgatataaagtagtaccttgcataatcacaccagccatcttcaccatgactaaacccgggctggttgcgattgtgattttataaatggataggggcattgcactatatcaagctcgaaaaattgtctaaagtgtgcatcctcgattgtatacttgggacgagtgttagatcaccatggactctatggagactcatgcgacgcccaaggatgctgagaatgagcaatcaatcactcagagaacatccagtccttacccatcccatcccattgcccagctccagggcccgtttgaggaatcaattgtggaaaccaccgatggttctgtaaataaatgggttgtggacatcgacgcgcaaacacggcggcgcgatctactagagaatgacgaatacgagcggctttgtgggcgaaaatggcgccaaagggcatctgaaaagtgaaaactcatcctcctgtcaagcatgatcaaatcgaactaatccaaccatacagataccatccattctggaaattgatttcccaaatggtcttcggagttcatctcctggccaagagtctagcgaaatccgaagactcagtcatgagaattctacagaaacatgtggatgagttagatggctttctggaaaggaccactgaagactttgtgatcgtccgactagacgttcgcactcgaattcagtatctcagagtaccgctaggaaatctcgatgtcttcgatgagatgctggaagaccggaatttccggctatcgattgtcgcctataacgatcagatcgaacattctattgagagattcaccctttccatcacggactcgctcaaagacctacaaaaggcgaaggaggctatgggtgcactatggttctacttccggaaacttacagacgaggattgcttcaagtccgagagcctcaagctttttcatcaggccatgatggacaacatggagggctggattgtcgctatctcaaaacttcgtcgacggggcactgctctccaaaaggccctgacccaacttggcttggcgactacagaaatgcaacgacgagtcggagtagcaagtagaaaggatgtggtgagttaggcttgattgggccttaagattctagcgctaactatcacagcgatcatttattaaacagaccagcaagaccgcaaatcgaaacaaatcaatcaaacaaagactgttcgataaaggacgccccaaatcagaaaaaccacttcctcgcgatccattatcgaagccaaagaggacatcaacggcttctaaacaggttgagaatccttctgctccagctagagctcaaaccgacactcctacggatctacccatcccgagcgatggcattcggcgcaggatcatgagtcgggctagatcatgcagtgctcttatagcagaagccagcgcaggcgccggcaccgaatcaccacctcccctcccatcaacatccggaaagctcaaacgcaagctctccaaacccttcctactcaaacgatccgccagcgtgaaaatcgacttgacccaaagtcgaccgaaaacagcaccatcacaaccctcacgactttcacgcaatatctccatagaacagctccgagcattctgctccacaccacgccctcaaaccttacaatctagagtcaaatcacccacacaagcgcgacaggaggcccacaaccaactcacgaatggccgagagaacatgaaggagcagatatcccagttcctcaagacggaccgcgtggtcgaagcatgggataacgtatccaagaacacatgctgtacactcccaattaccaagacaaaagactggcctagcagcgtcttccaagccaagtcttccaccctagaaaataagggcaacgacacaaacccggacctggacagacagatgtcttggatacaggggaaattcgacgtattacctacatactcattcaaaacaaaacctgacatgtcgccccggatccatgttctatcggtgcagatgacccatgacaacgctaatggggtgactgagcgagaggcgagtttggatttgaaaagtgaattcgggtcgagtattactgcgttgccggttgtaccgtcatccattccaccggttagttgataagagggttttcgatattcatggttgttgacattattatatagattgcactggagcatcgatctagattgattgactgtgctcaaggttgagtatatatgaaagtgtagtacattggacttatagagatatataattatagagaattaaagtgaatatgcatagccatgtgtattaataatataatatgtaactaactattcgtctttcgtatatataccacgtactccggattcgtatagtctcagccctgcccgactgcgccacaatggagattctttcacttttctttctctttctcttccttttttctttataaaacttcgaatacattcctcttcctctttctagtgatttcctttcttttacaaatataaaaaaagtaccaagtaccggtaccaatctgccccatacacaatagggcggccagccaagtcactgtaccttccccaaccccccagactgcagcctaaactgccaaggacccaccgctctcaccagcccccgttgacgtcgaacatctcacatcctttgggattcttacattcttctctttcggcttcagattcttcactttattacttctgtggtcgcaaataattagcccgtcatgccagccctatatcctcgatactggtaggtgctatgatgactcccgtcaagagacatatcactgatccgttacagctctggttactttggggataatgactgctattccacctgggactcttggggtcgctgggtagcgttcgccgtgatcgtcggtgtagccttcctaatcttcttcggtttcgcgtgagtcttacctaattctcttctatgcgatgtctcgcgattttaacaagcttgtcacagatgcttcaacgcacgccgtcgccgaaatcatggccaacgccctctcacaggaacgggatggatggctcctcctccgggccctcctccgccaaatcaacccatctaccagcaacccccatatggcgacccctactaccagcaaaatgcgccccctcaatacaccccgaaccctcagaactacggctactttggtgcgcaaaacgcaccaccacaacagcaaggcatcgagttgcagcagcctccgaatgcgtacactgccaacagtccccacggatatgcgccgcctcctggtccgccgcccaacggcaataaggactaaactctacatcattttaaagcttaatacgcatggctttgaaggtcttccgatattgcatgcctctcgatgaatttgccggaagttaatggtttacggcgtttttaactgcgaaatgtggtctttttttggatttggtcgcatacccacatgggtggatgtttttcctttactacttaatgcttcatgtcttccatgtcacatttaacccaagttcagctgaatttaagtatttggtttgcagcctgagatccctgaaacagcgggacttgagggttatagttctatgttctctcgtacatcgtttctctttaatatatcttggacggtcaaacttgaactgaactgaattagaattgctctttcaaagctaccggctctttttattgattcactgggacatcgtgtgattcgatcacgcggtttcggagcagaagaacagaaggtccaattgatacatggtttgagattggaccagttgaactcgctaatttaacaactcaattttcaattgtaaaccggtctcgcaatatattcagattgatatatttgatatagcgggctgattagtgccccaggcaccccatctccgccctccgccctatatcgggctccgctctgcgttttctcaatgcgacaacctctgagcccatggatatcgacgacattctcgcgtcagtggatcgcggtccaggcgccagcctggaatccgcagcgctagatcaccagctcctcacgcgcttctgggtagctgaacgcgccgtgtcggaggtactaccgtggccggcgccactgatggagcgcataatggatcgcgtgcggatacaggtacacagcaccttcacagcactccctaaatccaaatcactaatgaaaccaaatacctacagatcgaaacaatcgaagacctagccgcatcctcagaaacaaccccaacaaccggaaacacgcacaaccccaatctcaacctccgcctctcaatcctccaaaccgacctcgcccgcagtcaatacatagtacgcagtcttctgcgagccagactggccaaaataacaaaatacagcatgcactatctagtcctgctcgcctcgcgcaacaaaaaccccctcgcatcgcaaacacaatcaaccgcctcctcacagaacccgaaccagcagcccgaggactccgtgccggacatatcagagctgacggatcttgcgccgctgtcggagccggaatcgtcgttcctgcatgcgcaccagacgctcctggcgggccactatgcggggtcgttcatgggcgcgttcccgcggcagctgaggcggttggatgataatgccggtgggacgagtatgatccaggggccagagttgaaagaggttgtttttgttcggtgtcttggggtggaagttcctgttgttgttggaggggaggacgaggaatatgatacgggggttacgatgcgaatgggggatgtttgggttgtgagatgggaaggagttaaggcggcttggggaagaggggaggtggaattattgtgagtcctggagtcttctagactggtttgatattcaacttcatcatagcggagtggcgttatttgggttattttatgatatattttccctacttttgcgggacttgattcaacgatgtatgtatgtcctaccaaggcggtttccattggccgtgctagtaaatatcaaatactaaatcggatggttttctatagctatttcatttctttcaatcccctaaaagacgccaatcgctaagctcagagaaacgcaagcactccgaaagcagacacatataccgagatgcgaggacaccccagatcataaaatcataacaaaccagaaaagaagtagaccagatagaaggcagatgccatcaccgagatcgtatgacattatgcgacatacccgtaggtgggcggatcttcagagattcgctccaggtattcgcggtcaatcagactctcaatgcgacgcttgatcatgttcacgtctgggacaaagcgggcggaaagttgcgaaagagtctcgttcattagttgagcatgagtaagcgttttgcgttgtctgccagatattagttcgtcagatcatatacgaggattatgtgggagtcatacttcataatgcggacgatagcagcttcgatggtaccgttgcgctcgtcattcattttcttttcagtgatcttgcgctgatcttggttctcgactttgttggcaccgccgctgacaactccgatacgcactttcacaaaggggctgtggaaatcattgttgaaaaagaagcggtcagtgggcctcacatccttgctcataggctccttcttcaacactcgagtctttggggcaaccgcaagcgattgcaagttgcggatcaagtcgtggtcttgtatcagggtgcgagttttgatctcgtcataggtgaggccttcgccgtctgggatgtcgttgaataataacaagatgatcatggcgtatgttgacacgttgagttcatagcgctggacctttccattggtgcgtacaaaggtggttcgaagatcgccagtgcccatgctagcctgccacgacagtttgcggccactgtgcttgtcgagataaaatctctcaaagctttgcttcagtgtatcaatctcccgtgggaaaatgcaaggcaattggaccgttccctctttggctcccatgatttccattggccacatcgtactggtgaggacgttgatctccaggtccacgggtttctggtcaggatcaccactgcgcgcaatgtgctccttgtaattggtggtaaggtcttccgagatggtcatatccttgaacatggactcaatgcgttgagtaaactggttaccgacctctaacttcatcttcgaaatcatctgtctctctgcatccatgctgacagagcgtttcatcagaagacggcgtgatagatgtttcttataataagtttcaaatagatccttgtccttgatgtaccgcaacagtgtaattccgctgtctaggagaacgtctacctcgctttctgtctttcccttaatgcccttcttcaggttttcatcgaagaagagagataggtactcggaatttcgcgagttttggttgatgaagttggcgaagctcgccccaattgagccttgcatgccctggtccgaggcgaaggcattctcccaaatgtcatcgaatttccgcttgaggatgagaatgtcatcgacccagcggattgctgacactgtttgctgactctgaggcttttctttgtcttttcccttcgccggctttttctctttttcaccatctttctctgctgatggggctggggcttgtggtaagagtatagacgaagcattgatttctttgcccatttccacaattcgcttgctgaccatgtttgtcaaagcttgcttcttcttgtcgactcttttattaagcgtgtaaatattccgtaacccctccaactgatcgtgatccagcatttgccggacgccggtcccctcgaaattgacgacctcgtcaatattgttccggatgagctcctcgtcaagcaactcaaggaccttcggctctgtcgtgaccgccaacatataacggcatcgctcctcctcttcagtgattcgctgggttgcgaatcggcaaaacatggtagcatctcccatttccaagagccgttgcccttctgtccggtagaactccttacttgtttcgagaaaggctggttcaaactcagtcagataaagttttgagctctcctcctctgtaacagtttcgtagaggccctccaacatttggatgcaatgccgaatgagcggccgttcaataatgtgcccagaacgttccagttggatcatgaatagtatggtggattcgagtacatccatgacagtcaaatcagagccggcacggacgggagctcgtaggatatggtctcggaatagagccaagcaggcaacgtagatggatgggtgagtacggcttgccaccatacggtcctgcgcaaaaagttagcgcattgtatcaataccgtagagcgtgaaaaccccaccatatacatcagaacatcggtaaccatgcccatgcccaattgatgatcttcccaggcatccttcaggacggtgagaaacttctcccccgcctccctcctctcacttgactggtcctgcgcatcggtggatttttgcgcccgcacgagggtcgaagagattgaatcaataatgtgggttctgacattggttttcaaccagtcctgctctagttgtttgacttgttcgtaaagatcggaagcccgcatcatcaacacgatcttgtaggcatggcggtagagctcttcaaatgccagggttgaggcatttttagtattaatttcagtcaaggatgacgagaggactgtccagatagaatcgaaatcttcggtattggcatgggagactccctagaagtatagttagtgaatagcctcataagtttaaccccgcatggtcaacgaactctgcgaggagctcgaatcttgtgacgagccctcattgctgccatcttgaaggcaatgcagtaagtccaagagaaagtgagtgaatagagaacttaacaaaaaaaaaaaaggtgaagaaagaatgcgctcttctctccgcggaggccaaccccggaaattctaaagttccggctgtcactgaccgagcatcgtcatttcacctgtgctttttctttttctctcaagttttgtctgaagcttgcctgaatactttctctctgacttgcaaatatctctactatctttggacttatttctctgtcagctttcaaacacttatcaccatgcgccctttcaccccgggtctccgcccattgaatgcccttctgtcgcaagcacagtcatacactactgttgcgcgcatacaatcttcacgcttcctctcaacacaatctttctctctaaactcagctcgcccatcatctcttctcccccgctcgcagcgtatcttcctccaaacccaaatccgatacaactcccgcgctcctcaccctctcaccgaatcacccaagacacccaagagtcaggcggagcaggaggctgaatgggaagcgcggaaccaggagcgtcgcaaggatgaggaagcctatcgcattacattcacgtgtaagccgtgcggtcatcgctcttcccaccgcatgtccaagcaaggctaccatcgtgggactgtgcttatccaatgtcctgagtgtgactcgcgccatgtcatgagtgatcaccttggtgtcttctttgacaagaagacaactctggaagaccttttgaaagagaaaggtcagacattgacccacggccacacggagggcaacctggaattctgggaggatgggtctgtgaagagctatgacttggagggcaaggagatactgggagcaagcgatgagggtaagtcggcttgacttcattcgaagtgaggttcctgcatagattattggtggagtcggtgcatattaggtgttttgtttgtcttgttggatgtgtatattatggcgatgaaagactctctactcccagcatggcaggatccaagcatcgacgagaagaaggatatatattgggggctttgtacattaaaaatcactttgactgaattctcagtcaactcttaattttcaaggacaaccctatcttcaaagacgacatattgagaaaacataagattgtgtacagaagaaatcaaattgttctgagaaggtatatacaatgcaagtataaatgtagtaatccattccaccaaaacgcccagttttttgtatgccaataacaccatttcatgacacatgcaaatagatgtcaaatcctctaccaaccgcgtctctttccacggtgctccaagcccttctcacggcgcttgtctctcttccgctcgttcttcttcatcttatcacgtccgtgcttctcagggtcagcaacagcgtcgatgcgacgcttagcccgtcgtccttcacggcgttccttgatagccgcctggactctagatatatgctccacgtactcggtggtgccgagtttcttctggagaagatctaagacctcgtgacagttggagacgagggatttgtacgtgttctggaaggtctcatccgaggagcgtggcgccgggatcgatggatccgtcagatgctgcaggggaatgagaataacgcgcagagaaggccggatctgctcaacctcgatgtgacggatgagtgcggcaagaagtgtgatggaggctgtcttgggaatgagggcttctgctcggccggagatagtttcccgtcgcaaaagggaggaaatctgcttgaaaatgtagtggatggcagatctgttgtattccaccttggcttcctcctttgcctctccttcagcttcactgccagcatcctcatcctcgtcctcatcttcggattcaacatcctcacctgccagctttggaagcccgagtccgttttgagaacagcaacgtccaaggaagacagtgttgcgtacactctgcatagcaagttcctcggcaatgcccggggtacgcagactgcgaagactggcgcgaagaagctgcagcatagctggcttgtctatggcgagaccggaacttccagtcaagggaagggaagcgtaacccgcagcggcatttgtcttggctagatcagccatccacaagcctacaaggttcgcagcacaggtcttgacccatgcgtgggggaagaacaggcactcttggacagacgtccagatagaagcgcattgcgggctcagagcaagtgtggaagccgtcttgcaaagctttgtgaaaagttgcaaggcatagtaaagagcttcccaattgccattctcatgatcatctagaacgggctgcatcaagccagggaggattccgatgacaaatcgagcctgtttatctttctcggtctgctcggcctcgaagtagatgcgcatggcctgcaatccaatactgcataaagccatgttgtcagtctgctccaaccacgaccgaaggggagtaaggatagtcttcatctgctcccgatccgcacgattgaagaactctcctagcaatgtaccagccaactcgcggcattccggcgagtcgtcgttcgccatagcaagaacgataggcaggaagaaggtgctaataatatcttgtgccaattctgggccggtctttgaaagaagcgcgtgcatcgcctccatgactgactgccgcccggactgatgcttgtaatccaggttctttgcgaagaaagcgagctgtttggtccatcgactctttgcctgcgggtactcaatcagaaaatgaacataggttccgcgagcaagatcccgcgcagaccgagtttggtttgtcaccatcatggtcgcgatgttgtccataagctcatacatctccggaacgacgagtttccgggacatgactgcgcggatgaagttgaaagtcacaccttggcgatctggctcctcaatgtcggaagccagacgcttgagcaagtatgcgagatgtccgtcacgaagcttggtgtcctttcgttcacgcagcatggaagaaatcaatttcagggacgcttgtgccgcttcggagtttgtgctaggagactccttaacaagcttgactgcttcggtgaaatagacgtgtgagttctcgtcaatctccggtagcggaagcttgatgatcgtggatagtaaacggagagcagaaaccttcacttcctcttgagactgaacaagcgcatcaccaatgatgggaatgaagcccgacaagttagaagctgtcaacaacgaattgaacttgttgaggatagcacgaagcacatccagcgagaaccgggtcagcttgtaaacatgtgaagatgtcgtacccctgtgctcgccccgcttagctccttgcaatcggatcaagaaccgctcctcgtatctggtcttgggcacagctgggcccgcatctggagcattgtcccgataagcctctttgatgacctcgtaacagaagactaacatatcgcgactttcggcgtcagggtttctcagaagaccgatgccaatccttcgcatgagctcatcaagcttgttgacgagcttcgaattgagcttttcgcgtaggagtgcctggagaggcctaatcaggtttgacaagtggttgatagttgagatcttagccagaagctccatagagtcgtagctcttgctgctcttgacctcctgcattttactggtgtatccttcggcatccttttcttggccgactgtgccaaaggtatcatccatcacaaccgcaaccagttctttcaaacagtaatccaaatctccttgcttgaagtgatcggtggtggtcacaagcatagagtgaacggtgaatgagagaacgtgaagctgataacctcgagcgagcacattacggagttccttgaggatgtagccgaaataaacaggacccaaaaggagagcgagctcattgagtgttttccgtgcagtatcacgagaatcctgtgctttactcttgagggttgcgcagacatctagcaggactggcgggagacgaatagccagttcttcttcggggagaatcttgagaagcttgacagtggtaatcgaagccggcaggcgcatactcatttccttctcctgcttgtggtgaatgtacttggtcaggaaaggaatgaagtttgtggtaagctctgttgacaccttcgcaagagaaggaacagtcttggcgagggtgcacatgggcagctcgacaacatccatcttatcaacttcaccatcgatctggatttctgtccctctctttcggttcattgcactagacagcgcatcggacatgcggcctagcagtctgaggatgttcttctccttttcaggcttgcttgccatgtagctgcggtatctccgaaagtttgctcggaactgaccccattccaaccattcagagagaacgccaagggtcgcaacaccttcggcaatcaggttgtgggcgttttcatcagcagcatcctcgaagatgaaatgctcaatgaggggaatgaagatggtgcccagattcgtagcctgaatgctaccttgagctgcgtctgcagccagacgtcgcaatgcacgttgccggcggtgctgttggatgtggagaatgttggtgaagaaagaggcctcttcatcatcgccgacaagaagaacgtgcatgtcctgcacagcaggtctggtggggttgagtttgacgaagtagccaatgactgcgacaacttcagagcgaataagttcagacttctgtcggatgccgtattgcaaagaggggaacagaacatcattgatgagtgcctcaaagtctgcgtctggttctgtggacgctctgtcgatgaatcgtctcagaccgaaggaggcgctagatcggatagaaagctcatcttcatccctcagatggaaaagcatgttgtagagaagaggcttccactgcttcgcgctcagagtttgagacagttcgtcgctgactgttctgaaagcctgcagacgtctggcataatcgggttcgagtcttttagttgagcgagagtttagatctgcacacaagtcggcaacaatcttgaggttctcgtcgtgcgtagcaagagcaccaaaaactcgggccaatacttctctgttcgcgtcatccttgaagtagtcgaacatcgagcacaccgcatcaaatacttgttgcgcgagctcggcatcttccttggggtcccataagggcaaaaagtgttcgagaatcttcaacaaaccagacttggttctggggctaacacgatccgcgggctgacgaagcagatatgtcgtaattccgacaagactagcggtctctttggaagattcgacgcagggagcgatcaaggaaagagtattgactccggaatatagaacgggcttcgatgggcctctcttgagaagacgaccgaggtggaagagagcgtgctccaggtagggagagaggacttcggatttgatttgctcagctgggaagtcaggcatctcttcggtttcctgtaactttttgtccgtggactgcgcaactaacggaacgagaatctcatccaagataaagaccttgacttcatcgcgggcagattcgaccgcgagacagtcaatcaccttagtcaagaccttgtcattgtgctgcaccaagtagaacgttgaccttggaacagcggcccaagtggagaacaatcgtagaaggcccgaaacaccttgtgctgtctcaatagggaattgatccagtctgctgtcaatcatctccttgaagatgatacggacgtagggagtccaatcatgattcgggacaattgagaagaccaaattgagacagcgaatacactctgaacgaatactttggagcacaggcaagaggcgttcatctgggcgatcgctaccctcgttgtaaatagcccggcatgctcgcaccaaacagtagacaaccacatccatcgtctgcgatgcaaattcggtcatgcgggtttgaagggtctcaaaaacagtatcgatcagcttaagcagacccagctgtcttcttggggttgtcaactcttcctggaaggcagtcggatcgcactcatcgttgtctttgacaacatgaacgtttgcaagaggaccaaatgaaagctgcatgaaaagcccaaagtcgtgctctgaaaggtgcgagatagttcgaagaatagtcttccgtctgccagcttggccagcggccgctgaaccagccttagagatcattcgaccatagagtagtcgaaggacaacggggaggaggacaacgcggtgctcttgttgaattagactttcttcgtcgccgacatgcacgaacactgcaagctcatctttgaatctagcctcatctaagagattaagtaggttttcttgatacgggcgtacattcggatctttccaagtgaaaaggactttcagcgcatgcttctgcagatcagaattaccatggcacaggagtcccagaactgccgcatggacctcgggtgccttaaacaagacaatggggttgaggaactgcgcgaacaaagcaagcatcgacaatcgatctcggaatccccaacgcacttgcgcatcatcagtctcagtatcttcgaccttcggctcgccagttgcgggcgcgtcatcttggtcttcgcgcaatgcccaggacaaaaacaatggcacaatctggcgcgagcgtttctcagcaacgcccggtgcagcgttcaagacacgaagtgcatgggttcgcggggaagcgggaagtatgtttgcgactgtgtggtcttgtttgaattgttgagatagcacatgatacggatcctctgtgctcttggtatttgcggcgagtgttttttcaaccttggcgacattgtaacactggaagtggctcttgacgaaagagctttcgtcgtcttctgttggagtgtcgctggacgcttcggaatcccgctctgacagccactggatagacaaatcggacacaatcttctcaccctggggattttcgctaatggtctttaatgcagcagcagagtcatcccacaatggggccaacttcttcgagaacaatccgaagcaaaagtaagggaccagggtggccatccatctgcggtgagcaatttgggggtagagaatcgcaagtttgcggatatgcatagagatagttctcacggagtccattgtcagcgggctctcttcgacttggatggctaattccacgggcgaggggtcgtctttggcaaggcgaacaattaattcccgtagaatctgaagagataccagcctcagcctgtgcgatgggcttgccaggttcacaattaaatcttgagcaaaggcttccagggtgggatgttcgaggtctgcggattctgggagagaggaaatgaaagtaagagcaccctccaaaaagactggcaggcgagagaattttgtagcagtggcgatgattggtttcaagaggctcgagtcaagctctccaactttgttagcgagttcgacatacgtcttgaaaccttgaccaaggaaaaacactaggcccttcgtctcggcgttattgccttcagctgcaccatcttggaacgctgataggaggttactatgcaacttagagaccatcttggaaattgtagcagaatctgcaaacaaagagatagcggctggaagcttcaccagcgcattcaagaaggcttcatcttttgtggggtattccaatgaatcagtgatgcgggatttgaaggcatccgggcaggaaatgtagccaggttgcgagatctcggacgtgatgcaaccagcctcatgcaggcgtaacagggtgaaacaagtctcccactcggatttttgccatgatgaattaataaacttctggaaaggcgaaagaagcaagctctggaatcgctctgatccccactctgagaatgttgcgcagaagaataggaaatattttgaaagctggcctgtagacactaggtctataatagggcgaaggaaaggtagtaactcgtccatgggggacatttgaaaggcatatgcaacgctggtaaggatctgtaatatcgtttctgatgatacatcagatgcggacacctgctggaggagggacagttgaatctgatgaacgatcttccagttttggattctgacacccttgcgagtggtcacaagcaggaacattatacggcagcactccgagagattgagattcggggttgattttgaacgatcttcgatataagccttgattgtgtcgagaatgggaccgaaggtatcgggagtcgtggcgtggacaagactgacaatcagaccgaatataacttctgcaggatcattgtggttttcactagtcggcggcatctggcttagaacgcaattgaggatgtccatgccattggagtgaagcccgttattgactcccctgatagcatcggagaacatgttcatcaatccttccctgtagttctcggtatccttgttgtcgtcggcggccttcgagatatcgtcgaaaaggaacgagaccgcagtctcgaggggtgctttgttcttgtagtaaacaagaccggcctttctaataaggaacgacatcgactcagcggcgaacctcgccacaaatggcttttgtcgttcttttccgagatatggagtcattatacccagcagctgccgtaggtctggtaccaacagacgagaaaggaatttgaagatccatgcaagacaggtgaaactccattcaacgacctcaatatcgggatgtgttgccgcaacggacgacaccagtgtcactgccgtagcaaaatgtttttcgaacttgacacccaggtcccgagcaaattgcgcaagcaagctcaatagcggctccatagagagctggtctctcttctcgatgaattccaccaatagacccataatcttttcttcatgatacagaacttgcgcaaagctctcggaaagagggttgacacgccgtacaaattgtgtaaagttgtctgaaaggttcatctcgaaccagtgatcgagagccgctcggaaataagaagatgtttcgtcttcatcttcgccgaaactggcgcggcgcacgcggtggatcgggtcgattttgagcttggtgatgcgtgatgaaaagccctcaaatcggtggttctttgtggtttcggtgcctgtttttaggcgcctaacaggctttgattttgtgcctgtccccaccatcttgacgggtctgacgagcagcactgttcgtgagaaaggtactggctatttttttttggctgatccgcatggaatacaaaaaagttattcgggacgggatttatttattccgaggccgatatctacttacatcacgtgctgataaggtggcccaagctcctgctttcgagaaacccgaggtgttctatcctgcgcctagttgcatgtagtcgatctttggtggcagctttggacagttcgggtgtttgaaaaatcttatacttttcgggtcttttgtctgtccgtttccccccattttggctatcttttatcaaattatttcaacatcttcctgtaccgagtcgaccttccacaaagacagactcaaaaatggctcccaaatggtatgtatgtttaggtctgcatgtattccagtctctaaccaaatctatatgtagtattgtcattggcagcttaaacggtcagatacggcctttgttcagcaagttagccaagctgcagctaaaacaacatttctcctttgcgatcattcttggcgacctcttcggtgatgggtcaactgaagacgagctcactgatattaccgcattgctacaagggaacattactgtggcgtgcccaacctacttcacgcttggtaaccgaccacttccccctcaggtggtcgaaaagattgaagcaactgatgaagtgtgtcccaatttgttcttcctgggaaagcgaggaaccttgaagacaacagatggtatccgtattgtggccctcggtggaaccataggagaggcagagggtagatccaaacccgagagcaatgctagcggcaagttccaacccacatacagtgaatctgatgctcgtgcactgttcggcattcacaaaaccgacattcttatcaccaaccaatggccgaaggatgtccgtctaggatctaactgcgaggtctctggggataaggagactgtgccatccgaattgcaatgcattgctgatgtctgcgcgactctgaaaccccggtatcacttttctcggtcagacggtgctttcttcgagcgtgaacccttctttcacatgccagcagaggatgaaaatacctaccaactcactcggttcatctcattgcctactttcggctcgacaaaaaatgctatttatgcttttagcttggacccaacagcacctttcccaaccagtatccccacaggctccaccatttgcccttggtcggcggcgcaaagtagacgcaaaatgctcccaagccaaaatgaatcataccagcgctacgccccctccgacagagatagagacccagggcaccagcgccgacacaaagaacgcgcccctccgccaggcccggagaattgtttcttctgtctctcaaatcccaacattgccacccatctcatcacctcaatcggcaatgacagctacatcaccaccgccaaaggacctttgcccacaaccgacttcttcccttccctgggcttcccaggccatatgctcatcatcccctttgaacactgcccgaccatcgacctaatcttcgacccggccacccgagcttcgacatttgccgagatgcaacggtaccgcgaatccctgcaccaaatgctgaacgagcgttcaggaggcaagctgggtgctgtcacatgggaagtcagccgctcaaacggcatccacacacattggcaattcctgccgatgcccgtggagaagatccgctcacgccttgtggaaatggcattcaagaaggaagcctcgaacctagaatattcgacgttcaagaccgtgccaaaccccgatgaaatgcacaatcatcatatgatcgattatttccgagtcttcatttggacgcctgcgctcagcagtgaagccgaagccgaaggcgataattggtcttcacctgagcacaaaggcgtttggaagactgaatctggagaagagaatgttattattatgaaaatcctgccagagacccggtttgatttgcaattcggtcgtcgggtcatgggcaaggtactctatttagatgaccgtattaactggagggattgtgtgcagaccgacgacgaggagacgaaggacgcggaggctttcaaggaggctttcaagaaacatgatttcgcgatggaggttgaggagtgaatgtgagatcagcaagtttcttctttattttccaggttcatatatgataaatgtgtggtatggtgatcaaggggtctttccagggggcgcgtcttcggaaagctcccttttcgtgtatagtacgatgaaatgtgacatgagttcaaaattgaagccaaaattcaagtttcacagatttttgcagattccacgcggaccacatataaggaatactcatattaatgcgttttcctatgctgtttcaagcactgagattctagcgatgcgaaactgctagactatgcccggatgctcgagatgctaaccttggaagatacctgcgcttttaaaaagcctaacgcttaatcaactgctttatcgtcaattactttagcaactacttaagcaaccaattaagcaaccgctgtagtaactgctttagtggttaattaaagaggatcgtcgtttcaagtctggtgaatgtgataggccgaaaggcgggggaaactatggggatgtgtcccttgttgaccctgtcagacctcatctcttggtgtttcagctatttccctcttctctccttcgtcgaggctcttcttccggccatttggcagtttcaatcatttccagagtctgcaactcatcgtttagtctttttttggatcctctagggtctcacacactctctctagtctttcttcgtcaatgtctcaatgttctattttggtaacttgctgcctgttcgatccaccctcttgaactagcatctattcactccatattcgctcatattgaatctattgtgtgacttcgcatctacttctacactcggacgcgccccgcctcttgatacctccgaccccgacacgcttgtacatctcattcgcgctacagttcacactagactacgtctagttttgaatacattggctgttcgcagccattggaaatcggatgattcccttatcgcattgcgcacccgctattcatttacaagatgagtccggcaaatattacactatgggctcgagataccgcgagtgatctcgcggcggttccaagcaccttctccagctgggacaaatgtatgaccaaatcgtactgcaagtgagttccctcgagggatatgctacctttgcgcatggtctgcattctgcatgatactaattaattggcgcaggtggcccgtcatcgttggtataatcgtcggttcgataattctactctccgtattagcttgcatcttcaattgtctctgttgcggctatcaatgttgcaagtgctgctgtagctgttgttgtccgtcaggcaggcgcaggaacaaaacgcctaaagactttgatgaccctcctttccaccagcaccagcctccgccagcaccaactccagtctatcaagcaccaccagccccgccctcatatcgtggtgcgcaacagactgcacatttcgacgcgcccaagtctccggccgcccatgttaatgaggacgccctgcctgaaatgcctacctgggctggtgccgttgacaagcatgttgaagattcgaatcattacgacgacgtcgaaatggagcctttgaatccgccgaacaggaatcagggtgccggtacacctggtgccgtttactctgaccattcacccaacccacccatgggtgcagccgcggccggatacagaggatttgggcctactgatccgcgtgtacgccggtcccccggcccacgagcagccttgaatcccgtccaagatccgtacgggcggcgctcgcccggtatatcaccatcagccccagcagctggctatggtgccgcggcctatgacccctacggttctcgctctccgacatcgcctgttgaagcaccagtccacaatccttacggccagcaacaataccaagattcctacgctatccactcctatggcgcaggaaatggctaccacgccgtaaccgccccctcgcccgtggctgcatacaggccgcacacgaactacagccccgtgccaatggccctctccccatcctcggagatagaccacgcggccgcgggcccaacatcaggcttccagcgccagccatcctttggctctagccagtatcccccaacatatacctcccagcctccataccgcggcttctcccccggtgcatcttctacgccccctcctgctttctcggctccttcaccttcagagtacactacctataacccccacgccaacaccatccccattcccgagcccgacaacaccagacctccgagtctgttgcagagcggtagaaagcctaccgtcaatgcttatggcaacttttgagtatgacccttgtcgatcgaggcggtttcatgaccagaacgttttttttttgttttctcttctaccttttttcgtttgataccattctgaggctttatttgtcttcgttcatcttttatacttacatgccatgaccttgggccaaatttgggcctagaattaaagatatttcctttctttcatcacttctcccacttgtactcttttgcatccacgggtcggctttgactcgttcgacgggtggcgggttttttgaaaaacaatgcgcatttttgcccagcagcatatgtcccccatgtgattcctcttgattgcggagcgaagcgaagcaattaaatcataacctcgtgtgtatgtcacgtgaccgttcttttctcctccaaaatcattagttagaatcaatgcagtgaagaagtgatgggctaactttggcagaataatccaaccggcagaatatatagactggcctaatctggctagacgataatttctattacgtgctgtaggctagttactcaagcggttactagagtggttagttacacgagttgaatgtttacgaaggacttgaagttatttgaatatttttttcattctcacaaaagaaaatcaaacatttgtgaactggttgtctcctccgattaccctttccagaccattaaaatctcacaaggaaacatatccagagagaaaaggcctgtaatacacaagcaattctcgttatgtacagctgtaagagtcgcactcgatgcaaagattacatcctcaagatcctcctcactaccccaatgacacggttcaaagggggatattatcgggacaatgcatgaaaatacaaatgctcctgaagaattcagccagtcaagggactggcgttgagcatcgagatgcaaatttggacagcgtggaatgatccacagaagaaagtgtgtacatagaaggaccaaatagtggattaaagggcgataatggtgtcaaaagaatgtccggagagaaaaggagatgccaaagtgtcggcagaatgttcgatgggaatcgtccttgggggtattgtcttcatgagacccatggaggtatgagaaaatggaaatcaggtgatggtaggccgggggcgtcttcgtgcgcattttcgggtttgaaagttgcggtgtcgtaagtagacatatgaaatgggactcagattcaaatgaggtcataggagtcaataacccagtatgatcctgggttgtgggcatagagagatgtggcgagaggccacgcaaggaaaatattgaagcaagaacccatgagttaaagagggtcagccaaggagaggacgataccaaaatgaggtatcaaagagatgaggaaaaaggtgaacagcgcggggtatgcagcatgccaacacgaatcagacgtcagcagaactgaggtggtcgagagaagagaagttgagggtaaaaaaaaaaaaagaaaagaaaaagccagcataaagcatcttggtatgcatcagccaaacaccacgctccaagtacaagacgacaaaaaaaaaaaaacaaagaaaagacataagacgcaagaaaatgcaaatcaccaagaaggaaaggtgagtcccttagtaggaaagcatgcgacggccaggggtccgaacaggcactgggctttgagaaaagggagagcttgggtagcggtttcgatcctcgccaagtcggcaacgtccggttggactgtcctccatctggggtgattgttcaccaaaggcaaaagtctgggcgcggttcagcttggagcgctgcttgaccttgccaagtccacgctcgcaggcaaattcgtgctccttggcgctcatctcgacatagttctgagggaagcagaaagagcgatgttcagcgaagaacgagctgtatccaccatccagaatgtacatatcaggatatgacaggttagggtaagtatcaacattgatagcgcggtcgtggtgacgcaggtacttggccatgatgggagcccggtgggcagagtactcgcagtgcaagacaagcgcagtgcgagcctggggggcattgaagagttcacctgcgaggcgttccttgtcgttatagttcaatgcaccattgatatggccaccctcatactcatactcgaagcggcagtcaatgatgagaatgttatcgaaatgctcattgaattttccattcatgagttccagaagagtgctcttgtcgatgcgaggcagagagtccgcgcgatcctcagggatgaagtgaggcagcttcatgctgggcggactcgaaatgtcactgatggactggacgggtgtatttgtcgctaccttggcctctttatcggcaataacatctgctgggttctcaaacatgctcaatgatcgtcggcattgcttgcgaggacgcatcatcgagtgagcgggtttgcgaattgaacagggaacgggcgagccgctgctacgggcatgctggagggatggccgcatacggggcggcgccaggtgagtggaagaattgttgcgcgagattgaacgctcatgggggggcgaatccccaaacatatcttccagggaagtggacgtgctcagagtggtcttggccccggttccaaatcggaaggggggtgctttgctctctggtgccggccgggtcaatccaagctggaaagactgagccttgcttctagccagactcggacgcaggaagttaggtcgctttctgctgccaaataagaatccacattagcaaaactgtagttggtggctgaataacacgtgaacttactcagttgggcataaaggcgactccatgggcgactcttgaagagggcttggtagcggagacaccatgggtgattccataggactgcccccgggtgtcggcgactggatctcgatctctgctgtgacaaaaaatgcgggcttgtgaggcagaggcgacatatccatcaggtccatagccggagctggtgaagaagatgggagcggcggggtggtcatcacatcatctataaagtatcagtcaaacagtcgctaccccaccctgccattctcggcactgcttacctcgtccattgacctgaccaagcatactggccgtgaacaaagaccggcgtggtgtggccaactgaggactaaatatagagttagccgggctttgtccctttgaacctcatggaaggaccatggaccagctccacatacctctgatcaatgtggaaattctgagacaggtccgccgccagactggcagttggggatgatcctcgaatgggtttcaggttgaagtagtccgaactagacttcttcatagacaattccttgaaattgaacgggttcccaccgaatccagacattgagcccaggggataagtggaggcctctgaacgaaagcaatggccaaacatgaccgacggaggctgcatcgcagcgagaggtgaagagtgttccatggccggtgacaaatcggacctggagccaaaagccgacgtagtacagtttctggcaaagcaaccggaacggattggaacaatggcaaatcaggccctgcgcaagatgtctaccccgtactaggtcctacaaactgaggttcaaagaaaaaattgtctcaatgcacgtctccacgtttgcaatttcaacgttatgggtccccacgatcgccgtgacaaccagtccgggaaaaaaaattcctaggtcccagaccctcaccaccaacggccagagttgtgctgtgttcaagacaactagatttagcgggccatggcaagatgtcgacgaggtaggtgaatatggattccagagggcgactatgtcggacgtgattggaggggtcgggggggtagctcgtgggtgctgcaggagggggaaagggttccaagaatatgatatggcttgtcggacgggaacaacaaaattgaatctcacgatgccgagtgaggaatgtcgcgagtagttaagaagaagaagagaaagtaggaacaaagacgatttgaagaaagaagccgtgaagctgaagggatgggcttgttgcaatgggcaacgcaggtggggaggatctccgaatgtacagagtattgagtaatactgcggctccgatattcatgtaatgaatattttaatattaaaaaagggtatactagaggtattgggggtaatcgacgtaatctgggagtaatcgaggtatgtatgggggtggaaaccgctagttccagagtacggaaaaagcccaaaaaagaattaaaatcagactaggacgaaagggaagtcaagaataaacctattaattgactaaaagagactggggaagactaagatcggtatgcaaaggcgagtaaccggagacagtaaaagatagacagtccccatgctctggctaggggccaaatactttttttcgtcgttgcccggggctcccttgccgcagcaacccagcgcctatcacagctcgtcgggttgctggtatagacgatgatgtctcgggtttagctttgtctcccctgctctatggaaggaggatttgtcttgctattacggagtagttatacggagtattacacggagtactattactatgtatgaccagggctacatataactagggctatatgtatgtagttctctcgtcccttcttacgttaaataactatccagtatccaccaaaaaacttttttttctctcccgtgtgtgtccgtcaccgtatgaaccacagttcagctgagaaaaaaaaaacggagccaaagagatcgagtctaatgcagaaaaatatccactttcctattctcgggagaaaatttaaagcttctgcaagtgatgggaagcaagtgatgaaggaagtaagggcgcgactacggagtacatacaattgaacggcttcttttttattgcgttgcactttaacctcacgatatgcttcgaaatccaaaatgctgagaaatgtggtctggaaattagctccattcacaattatagtgcaatatagtgctcgattgactcaactagtgcgataagaagccctcttacccgaggtattgattggcccataccggagcgtgtaaatcttaaagatctcgtcttcgcaatgtgaaaagagttgatcctatctcagccctattaggggatatcaagagccgatctgagctggaatctgtctcctgtacgtcgtacggggtatgtacaatgcggcatcttgcacgggagtgtcaattgccgttgaattgtcgaattgcttcgagatcggagcgtccaacgtagtatcgtgtaaggaatggtagataatctcattctcctctggaaagcgaagacgccatacccgtgctgcccttacttgtaccggcattcttgttgatcaagggttcacgatggcttccaatgtcgcgcatcccttccatcccccttggtaggatgtttgacttcaatatacattaattgcctaagggtagttcgattggagtcccgctgaatggcattcaccgcgctttttgcaacttgacaatgaatgcgattgtatctgtattgccctcgctccggaattagggctaatactcgcatcaaggacaagccgggatcacgatttatgcgattgacacaacaaaccaccggtgaagaacctggtacggtcaacaaccttaaacaagtttatcagtatagatctcctccatcggtcctattcaggctatcagatgcgatatttacaaggtatactccgcactcaatctctcaattcgccaccatccacaggcttatactttgaacaaagtctgcggagtgtgttctacggggtgtgaaactgctaatcggctatagtcgtcaggtcatggtggacactcggctgatgatttcattactttattctggtattctagaccctctcgtgaaacaccggaacctcgggcttccctgttcatggtatgtcccgtcaatccgagatgcatcaacccccaatccgttgaatattaacaattggctgtcctcgctgttatatagcacttggtgcaggcatcttacacaaatccccctgtggcagacgatgcggtgtgctccccgacgctgttcggaagattgtattgcccaggtggcccgtgatactacgtcatatcgactgcacatctatctatttgcgtcccgtgcacagcttgcaaacctgatatcctaatttaagcttggaagtcgaggactaagccgatcttgaaaccttgggaagtgtctcgggtcgcgtcgacgcttgtttgggggtgttttggtctactccgtattgaccacaacactggaatatgcacgaattagcaagcatccactttccaggcgcttacagatgcaagactctcataacatgctagccatgtcagcccaagtgccccgatctgagtatgtatctgcgccacgcctgcagtcatagctaaggtggggtcggagaggaccgcccgatgatgtgaccggtcaattgcatcacaacgccatgtgcgatggagccagtcatgtcagttctccagccgactgactttcgctgctgcggggtccgtcacatctcacctcgtgtcctgctaaacataacctgcatggagagatggatagggttgtctagacctttttcccctccttgtccaagaatactccccctcttcccgaccaatgtgatgtcacgatcgtgttgattgttgatagcgcgtgcagatgaaggtaaacaaagcaaaccagattccaagctaatgcgatatcccgtgatcgcacatgacatcaaagggaaacttgcccagatcaggatttccgacctctctcaactgggattcgatgtgtattttggtatattatacctctagtaagacatacagagtactggaaatacacttaccctacatttcccctgggcttttctatatttgttaattattattctcccgtcccggggaccccgatctgcgccgctattggtatcctttatccgcctcatcggcttcgtgcctgtcagctcccctctctcaaatcgtgctatcacttttctagtgacgccctactccctattgggctcgtatcacatagctccgatcgtggctgtctctgtggaatgcacccgcccaacgtgatagatcgagaggcctagacgccgctggactggtatattcgacagccataagttggattgtactggtttagactttgtctcgtggcatcgaatagcctcttttggtcaattattatgctcttttatgctcttaatactgcatccagacctcaagctaaaccccgtagccacccccgtctttacttaaaccccgtgtacactccccaatatcccaggactccgccagattccactctgaacctccgaacaacctcccaagtcacacagacccaaataatagggtcccggttgcatcaggcaacccccctgaacgcgcaaaatctgacacccgactctacatctatcacaccggttgccagggactcccaggcccaccacgacgtcggactccgtacaccatcaccccgagacccatccgcctacatcaaaaccacctgcgtgattcccacgaaatgaattccacatgttaccaagcacgactaactaacctaattctaaaaaaactacttgaaccatgcagatccacggtagacgatcgctcatccgttccaacacatcgattctgatacagaggtaattttctcccgactccttaatatggattctctcagatgtcgaatggtcccgcccaagccaaattgatagctcgatgcacggttcctggtttcactctctctctatcgcccgacagcccaggaatgttgctctgtccggtcatactcgtatacagatcagcccgggcgggtcggtgcatccgcgaaggcagcaccaagcggagcccggatagtgaagctcggatctagcgcaattagcgggttttcctcggcgacatgcgattgtataaatggatgctgatttcccggttgcctttgacaacaggatagctttgcgtctggactggtgtggtttgaggttgatagcccggctagcacttgggtgatctcgtttttgggacgtcattacccctgaatcagtctggacttctttttgatcccggttgccctgacagcttcgaatacaccgtgttattttatctactgaaacgttggttgcatgttcccatgtccgatctgttgtgtggtatttgaggtatctttgatgcggcttccaggggctacattggagaggtacggaccactccggcttacttggagattgtcttgagggtttgggggctagattgtcttggcttggatcgtaagctgggtagcgtttgactttgtggtttggatctgcctccagaatgctgtcagcaaatattgcttgttggaggccttggagtcttactgagaatagtcacatgctctaatatatatgtgcctggaccttccatatagcttcgcaccacacttggtttcctaacgcggccaacaaatcatgagctccagaaatcctcccgaagattctagaaaatatccacattgaatgaggtcgattgcccgttcaaccccaggctctttggagcatcgaaattcttatcggcttatcggtctaggctagtcctaaataggctaaagcatgaatttttctgagcgacttgaacggccgcaaggagtgttcaacgtgcctttggtttgcagatcttcattatccaaggcctgagagcggataatccaattgttaattcaacctcgcatctatccgctatccccaaaccccccagactcagcaatgggcccccccttcgccggttcaaagaagcgccgccgtgaacctcacaatgtcgacgtgaagctggtggaactctacgaggatctcgctagcgaaaaagatgatatccgactcaaggctgctcaagccctagtgtcgcaattcactccggaccagaaccctgccgatgaacagatcaagaaggtgctgtcgagactcttccgcggtctctgcagtagccgcaaagctgctcgaatcggattctccattgccttgacagagattctgagtcaggtattctcgtcgccgagggagacatcacgctttggcttctcggatgctctgaacctttgggagtctcagtcgagttcctacggcagcgagtcgggacaggttagtggacacacatgagttaaaacgtcgcatgcgctaactaggattcgttccatataggagcaacgcgatcaccttttcggtcgtcttttcggcgctgaagcgatcataaaatcctccgttctgttccagcccaccgtgcccttcgagcaatggactcaggtcgtcgatttggttttcgaactcgcacaaaagaagccatggattcgcgaagagtgtgggtggattatctaccagtgtgtctacgacctggccgcgcgcaagatggaacccaagtacgtccagtctgcgctggaacagctctgcttgcgcgacctcgcccggtcgcccgagggtgttgctatctggttggcggcgaaggatctgttccccgatgctactttcccgagcaagatctggaagcatgacgatcccctggatacgaaggagcgcagcagcatgtcgaagatcatgaaggaatcgggtgctgcgcccagcgagggcgagaccaaggtgaacactgcgaagtcctctggcgtctggaataacaagcttcacttcgcctgggatgcggttctctctcggaccagtgttgaggcgaaggataagtcgaagaagtctcgtatgaccttcgctgatttttggacagaggttgtggacagtgagtacctatctagcggtggaattctgctcaaggcacatggaactgacaaaaagtctctttacagatggattgttcgctgctgcgtcctcggacgagcgtaaatactggggcttccttcttttcaacagaattctcaacgatggcgggtcgcagcaggcctctcagattttcaccaagaaccttatgcgatgcttaacgaaccagcttgctgtggaggaccggtacttacaccgaatggccgctaaggtggccaaggcaatccaggcccgtgtgtccaaagagcctgaattcgcagctgcggccatccgtggattgatgggaaccagcggcaccctgaacttcgaccaggctacaaagaccaagactgtggaaaagattgttgccgaagccaaccacgaggcattggaagagattgtcccgttcttcgaacaacttattcaaaatcccggcaccaccgaggagaaaaccgccgcatccaaccgtcaattcgtcgctggtctccttttgtcaattgttcgctccaaggcttctgccgacgaagacgatgccgaagacctccaagcaagccttgagcagatcctgtctatattcgtgcgctttgcgtactttatggatgccggcaagggatccactgcccctgagcctcctctgtcatcggcgacacaagaactcctgcgcaatcgaatcaactcctgcttgaacagccttatttccaaccaaaagttcgccgctaccctcccgtatgctgtggtgaagcagattcgcgatgcagccaagtctggcgaattcggcaagttcatcatcgccatcgatgagaagctgtcggaatctgtgaaggctgctttcaaatctctaaagaagttgtccagcagggtatgatttctccccttatcagcttttagctacttgtactgaccatcacataggagaagaaggagaagggcatggccgcattcaagctgctttactctatgactatcatgcaggtgtacaacggagacgcagacgctgtatccatgcttgatgagctggagttctgttataccaagttcttgggcgacaaggaaactaagacagaagacgccggcgatgcctcggatgcgttagttgagatccttctcagtttcgcatccaagcaatcgcagctgttccgtcgtatgagtgagcaggtgtttggcacattcgctaaccagatcaccgagaacggattggaatctttgacctcggtatgtcgcctcaatttctatgagatatgcattttctaactagacctagattctggaggccaaggagagtctcgctggacagcaagagatgtttgaagagcaagacgatgaaggcgtggaggaaggagaagatgacgaggatgagatggatatcgacgaggatgagctcgacagcgatgtcgaggttgtcgaagccggcggctccggctccgacgatgacgatgacgatgacgacgaggaagaagaagacaacgaagaagatgcaaaggaagtcgccgccttcgaagccaaattagccgcagctctcggcacacaccgcgcagacgaagacgagtccgattccgacgccgacatgaacgacgacgagatggacgagctagacgaaaaactggtgcaagtattccgcgcgcgtcgtcaagaaacatcccaccgcaaagacaagaaagatgcacgtgagaacatggtgaacttcaagaaccgcgtcctggacctactagagatcttcgtgaagaagagccacacccgcccgctcgcgctagatgtcctcctgccgttgctccgactatctcgccggaccaacgtgaagcagatcgccaccaaggccaacggagtgctgcgcgagtacacaaaggtgtgcaagggcaattcgctcccgaagatcgaggacgaggcacaggccgaggcgctctgggagctgcttcggtctgttcataatgaggctagccacagtggccctatgggccatgcgactgcttgcagccaggctagtttgcttgttactaaagtgcttgttgcacatgataaggatgctattgcccgtgttgtggatgtttatgctgccactcgcaaggatcaactcatgagcactaagtgtcatgtgcagccgtcgttcttttcggagtggaataactggtgtgtttctgcgagcaagcagttgaagtgatgatgggttgttttatatagagattgcgagttatgatctgtcgctggacttcatgtcaatattattatcaggttcattcaacctgtctatatagtccacctctctctctaccttcctttaaaccctcctcctgtaaacgacgaagctaagtcccggcggtgagaagataacgttgatatatatcactgaaggtcatactgcgcgggtatagggataattatgaaatagtgagggtagtagatagaatatatataataggcctcgcggttccaaagcgagcctatatgaattattagtttataatgcattatcctgcagctgtatgttatcctcatcacaacgaattatagaaaactcccctaaaagccagtaatatatcgatgctcattcgtctcttccaaaacctccaacctcatcccaacctcaatagccccctcattacgcggcgcactcaacataccaaaacaaggcttatacctaatcccctcatccaccctacggtacgaaacaagtgtatcccacggctccttcttattcttgagcgccgtatctggatcaacattaggcacctggcagcgcgcacagcgagccacaatatccaggtcaagcggagactgaataacagcctctccgctaccagcggaaccaataaaagtaccgctagcatttcgaccagtaatgcgaaccaacttccacgaatcctcactccacggcgccccgccgcgaacaacgatattcggacggaaccgctcgacagtaatcgggtcgacgcccacccttaccagacgaacattgagctctgccagcgaagcctccgacgcaatcaacaccggatgcacgtccgcaaagccggttgtttggacgcggcctaggtagcggggggcgccgttacccttcagcacgcgcggagccgggcccttgtagacgagagcgacgtcgcggcgcaggaaagcagagaagggagcgttgatttccttgttgtacctgtacccgtctgtctctgtgtcccagatgtggacggggcccgtatttgtatttgccgctagccattgcggtgatggatgggaagggatgcggatggtatgaaaatgatggtcttggccttggtattggctgggtttgttgatttcgggtttcggtatactcacgaccaactcgtcgccgtcggcacttatcgcggtgcgaatgcgggtcatgtcggggatttggcggatggttagaaacgtatttgaggatgcgtcaatgagcatccagcggcggtcaaggtcaagaccatgctgtttaaggaccgttgattggacttctaggcctctacaggattttatggggtacatgcgcagcgagacgatttcgctggattgtttggggcgctggcgccataggcggagaagtttggtaggggattggactgatttgggccatcctttgaagcgcggaatcaggatgattggaattaggagcagaaggcctaatatcactgctgacaccatgttgtgcgactgaagcatgctatttgggaagggtatacaattacaggccaccgaggtgagaagtcggttttgccaaggggggccgccttatgatgtacggcatattcaggccacagagagatatgtggtactttcagtttgctgtcatactgttctgtcgatatgttgtgccttatcgattattgtatatggtatttgctttaggtccaataatagaactcggaagtatgaattagacaaaaggtaagtacttgagacatgccacatatgaacaccacgtataaatgcaataaatgagagggaaagaaaccggaaatgcacgtataagtccaggagaagcaactgctgaagcgaaccagatattacagggggcaaaaagaacaacatgtacctaggtcgacctcattaaggggtatatgcccaagacacagctgactgcgatgccgcaatctcgttatgccgaacccttcttatcaaaccaacacgcgaccattgccttaattaaggcgagtgcgacaacccggccctgctcaatattcgcatcctcagacgccccagggacatggaggaataggacattgcggtcctggccttgtaattgggccaaagacatgctggtatagaagatgaagtcgcacaagtagtgacccgcgtcattggaaatccgaagatccgaatcgggagcaaacgagcgccacgtctccaggaactggtcatcgggctgataaggtgaagcagaggaggggtcatctgtagcacgacctggggtcagaatcggtggcagacccaaacctttccattgtttttcgccgtccacatagccggggcgaccgtcgacatctgtgatgttatagtcatctcggtgagctagaatttcgacggagtaatattgccgcggagctgcgatgccgatatgaataatgagatcaggtctgcaaccaccatgagaggcagcaaactcctccagaatcaagggaagagtctctcgaacggtggcatatgccactgggatcggagtgggatgcacatggagtgagactcgacgcgggcctgagtcttggtctttgggtgacggaaaaaggaaagatgatggaagagaggaggcgaccagatatgatgcatttacaaggttggtcttgaagggctggttacactgttagtttcggattaccagcatccgaagtgcagatcacttaccccaaagcctgttatcaggacggatatctcattaaccgaagccgagggccgtggcgggctgttatcgacaggagtggaggatatatatggggcagcagtaccgtagtcacccatgatcacggttattctcgaggtgaagttgagaagaagatgacttttgtgcggggaagttaaaccttggatggccagacgaatgcgggggtcttggcgggatgcaacccatggattctactaacctaattctgttaagctatatataagtgcccaggtggcggccagttagggcttcatgttttaggcttattatgttgtatgttgtaggttggctagtttaccttttcaacaaaaagtaacaaaaagaaaatctcggatgggttaccgagacttcttctccttgtaccacggagtacagagctggtttctcctctaactattccaccgtttaactcgcagaatttgcaggcttctatcattggcacgcttatagattgaaaaccatctgcatatgcaagtggatccaggcggaatagaaaccccggtcaagaattgcctgttcgggtaaggatcgcttaatttggctctcgttctcgcattccaggttaggtttggagtatacccatcaatgtgagctaagaatatgactccggagctttgacatttgggtgaaaggagttggtcagcttagattttattggacctgtagatttccaatgttgcttggctttggctcggttcggttcagcttgacaacttgatacctacgtgggtcccccctggttcgaatatccagtccaagatcgggttgggaggaaaacggagtctcccttactggcggatggctcgggaactattataaatgagaaggtcctcggagaatatcagtttctagaaatctggggtgtcgcttctattgctgtccccttccccccttttcagtcttgaccttgactatggcagtcatcactgaattgctcaacagtccctatgtcgtacagagtgtatgcattgccctagtggcggtgtttataacgagcttttgggcagatatagcaaacgagattccccatagacacattcctctagttggaaaaacctggtgggagcttaccaacaaaaaggcccggcaacgctttactcggtcatctcgccaactaattaccgaaggatttgccaaggtgagtcctaagagaaatagatgacagcattatctactctcaaatatgttaataggcctttgcagggagcaaatgtctttcagatcatcggagccacaaacccgatagttgtattgcatccgaagtttgtcgatgaaatcaagaaccacccagatctcagttttgaagactccatcaaaaaggcaggttatgaaaccggaaataatccctgaccttggctaacttgtgaatagacattttttgataatcgcattcctgggtttgaaccatttcataatggcacctctttgaaagctaccgtggagattgtgcggaccagtttgacccaggcgctcggtatgcatgtttgcatctatctcacccgagagacatgattgacttatttaaacagggtccatctcacttcggctctcaaaagagacaggcgcgatattgaaggaatccttgcccgccaccgatggtatgccgacgcaccccatttgcaaccctcttactgacgcttcctctcttggtagaatggaagccctactacctcgcgcataagattccgtacatggtagctcgcctctcctctctgatatttgtcggagaaaccatctctcacgatgatgagtggatcgatgtttccgttaactatgccattgatgcgtttatggctatgcgcgatctacgagaatggccatctattctccatccggtcgtacactggttcttgccctctacccgaaagctacgcacgcacttgggaatggctcgctccattataaaccgcgagatagacaggcgggcattgattcgcgcgggcaagctcccagcagacgatccacctcgtgggcctgatgctctggactggtttcgcgagaccgccgaaatccgtaataacttgacctttgaccagtcttgtgcgcaggttggattggcgctggcggccattcataccacatctaacttgttaactaacgtcatgtatgacctcgcggcgtacccggagtatatccagccgctgcgtgatgagattttagcggttgctgccgaagatggagttctgaagaagacgagtttgctcaagttgaagttgatggacagtgtgatgaaggaatcgcagcgtactaatccactctcattgagtaagtcatccaggttctttcgatcctctttcgatttaaacctcttattgacaccccaatagcttccatgaatcgcctcgccctcaagcaaattgtgctctccgatggaactgtgattcctaaaggtgccaacatgttcgtctctacgaaaaccctggaagatgacaacatctaccctaatgctggcacttatgatggttaccggttttacaacaaacgccagcagcccggcaacgaacacaagcatcagtttgtcgcgacgacaagtgagcacttcgtcttcggccatggtgttcacgcctgccctggtcgattctttgctgccaatgaaaccaagattatgttccttcatttgctcctgaagtacgattggaaactgcagagcggcggtcgacctccgaacattgagaatggtgtcgaatctatcaccgacccacgagttcagattttgtttcggtcgcgtgagtcggaggttgacctaagtttcctaggagagtgagtattgggtggatgtaagcagcgcattgttttccctttttgttctatacatattggatatcgctaggttttctgatttaatcaccatggaaatgatgttacttataagcggtgggacaagctagattatcgaatgtccaatgtccccatttgaatattatcgagtcatttgaaaaaggtcaagtccaagtcttcgaggtgaccaggcaagactcggctcctcgaaagtggagatgattggcatctggcccacagttctgcgggtattgtggctatccattgtaagcgagatgagatcttgttactaaattgggaatggatctctgaatcggagaatttaggaacattcacagatctcaatgaatgctcaacggggcataaatcacacatatacgccgtggcagtgatatcaaggaagtcgagggtctcgtttagggttcaaatatcgacagaaataccacgtgacaggtaagtatacagtatatatacggtaattttcaacaacgtgtgttggacgcgtcgcgcgtcagtggggaaggctgaacgtgaagcttctccaaccgcagcgcctccaccaactctccccccaatagggttatatgggtcttttggcttgtctctttcgttgggtcgctcgggctccagggccccagaccgcacaatgagaaattgtgaccgctgatctacggtacccaggtacccgtaccaagatggttcggcttttctttgaaggcgacaaaccaattcactctgaaaggagacaaaagagaaaggattcttacttttcaaggcccgagcgactctaagcatgattggaagtcaaaaaagaaagaaaaatgagctgaaaggtatcagtgcagacgaccatcagctgcacttctatacgcaggctggccgttctccgttctgtttggtacgacatgcaacatacaagcccttgcagctatggtgtgaacggctggagacgatgtcttggatatggagcaacgatctaccatacggagtactcggcactgatctcaaacaccagccccttcatttatgaggtctacaacgtacagagtacagcatacagctgacaggctatacattgtacctttgcaatggaaaagagcaaacagcggtcattcgctaggtgtccttacctcccaagatggttgtcaaagcccggccaaattattcgacggtgcatgcatcaagcaaggccctgatatgcccaccgttctatataggaaagactcgagaaaatctaaacaaagcatagagaacagaattagacttgcagactaaaaagaatttcgaacaacgcataggattttcgcagtgggccgttgaacaagtgcacaagtacagggtaccacgtccagtaggctgtccaccacggggagcgcaggtaccaagtaccccccactgccgcacgcctcaccctacgcccaatcccccatcctcttcctcttcctccttctctccctccctctcttcctctctctctttaccaaccctttccaccattatcgcgagatcttttctcgcacgcttcttcgtttgcggagacgttcttttcttttgtgtgttattttttttcgggtaatgacgaaatccttcattccctactactcggacgggatggagccgcagatgtgatctggtgatccccgatttcaagttgccgcattcctcaggaagcacacgcacaccgagacctcggtttttttttttacttttactttcgcattactcctgtatctcttgctctcgttgcattttttcctttttttctccccttcacgattcacgacattgacgcgacgctgcgcgcttcgagtcgaagccgcgccgtactcatctactctcaactcccccaacacgccctcgaattcttcccagaagtcgcattgacccactgcgattcgcaagatcgcgacatcgccatcatgcctcaacgtcaactttcgcgcactctgccgaagaactttaccttctccctcggcgatgaacccaggactcccgagcgccctcataccgcaatgaatgtgcctccaccacctcgtcactcaatctccaatggccgcctgcccagggttcgggctcgcgctggtaccaacgtttgcgctcgcatggacatggatatgttccacttccacggctccgatgttcccctgccttcaattgaagtccctcaatcgactactaacttcgaagcgccttcattccgtggtttcgcccacgacgagggatatctcgcgccccctcgcgcgcgaatggattttaagacgccacctgcacagatccgcggcacgccttttgattcccacgacactggaaacccgtggccttcgtgggaccacactcctggcccaaacaactttaagcgcccagattcggcctgctcgagtgtgtctaattcgtcaatcgaatccattgaaacgttcgcatcacgaccgtctgtaggaagtttcaccagtgtcgagagcgatctgtttgactcgtacttccctttggagatgtccaaagaacctgagattgagtcgccttcgcgacctcagaagcagtcggcgcatgtcaaagcgtccaagaagtcctggactcgcgatatggatacccacttatggaatacctatcaaatctaccttcaggatcctactatgactccatttaagatgacacctggcagtatcccccctctgggagttacctcgcgtgttgcgcgacgcgccaagaagacatggggacagaagagcagtcgcattactgaatctgtctcgatgcggtctgttgatcccgatgaaatttctacacccaaggccatggacggagagttggaacgagcttggcccaagtctgactctaagactcgacgacgcctcaagatgctatgtcgacgcaaattctcgatttctccccactatcagcgcatcatgcagtctcgcactcccgagcctgtcgccgaaatgttcggccctgccccggatacccgcgtcaaggactttgctgataactcggcctacactactcgtgacctcggcgtttctcttgtcacctcctccgagcccactccactttctcgggttacacaagacttgccgtcaacgacggactggttcaacaaccctgtgtttgctcatgtcgagccaccagtgaccaagactcctagtcagcatcttcgtgtcgaatctgcccctagcatccctcgtcttggatctccattcgtatacagcacttggggccccggtggatcaaaccgccagctccatgaccctagtgctcgacgggagaccatccatgttccgggttatcgtgcccgacgtaacacatacttcgatcaatctttgcccaatcctgatgatgtattcgcaagcgtatccaggcagcagcagaattcttccgatcgggatgttgaacgtcgcttggaggactatgttcgtgacaacaagttccaagacatgggccatggtcgggtccgcgttcgcaatcgtggagctaccactagcgctgtcaatccaagagatatggaccagcttttctctccgccctcgtccctcaactcaggcccaattgagccagaggagactacacctgttttaaaaccccccatgaacccattgttagaccttggcgaaaatatcaaacgccttggctcacccttccgggtcgaaggaggacataagcgtcgcgaagccccgaagcgagtcattagagcacctgcactgtctgatccattctcgagtggtggcccttcatatgtcgggcctcatgacaacacctctccaatgcaggtttctccggctcaagtccgagataaagctccggttcctttgccatacaatgcctcagaggacggcctttctgatgctgagcgaatccgccggcaaatcttgaatatgccttttacgcgcaactaagttgcagcctttttttgctgtcgaatttccaagtatccgtttcatcgtggcgtccatttctttgcgagattttatcccctttgcattatgacttgaacgagataccgacagggccctggtacaacccttgcatttccagcatttttacgacagcaacaccaccatccacgactgtaacgacaagtctgattcacgctcaactccaacgacaaaaaacaccctaaaaaagtgatgggtctttcccttttttcatttgatcacaactcgcacacagtacatcgacatctggctgttggttacctgcctacgaacattgacctcgtttgtcttgtaacaacaccttgtgtgtagttctgtttcgccccttttactcgagaccagcatttctcaatgcagtttcatcattccttcactcacctcatttccttttcttccaacggggctctcacctcgaacaaaataacccaacaccccaaaaaaagttgaaaacaaccgaaaacccatgtctgctgtcaatcagttatcattcgctattttcgcgacccacgttccttacatattctccttatcttcttttctcagaccttgtctagtcgttcatcccctgcatttcctacaaggtacaacatgcatttctcaccatgacatcttggagatgtggtcgacttgataatggtcgccttccgaattacccgtcacacatggcaacgactacctgcatctatgctgacccttgccagtcaacatagatggcaatgcactccctcaaaaaagcgtgcaacgatacatatgcaagtacatagacgaactgaaacgaaacgaacgcgcatgaatattgcagttgaccaacggcatccctgatacgcaagcgaggtgtttggttttcttttgccagcgattcccatttcttcttaatttgcatctcatgatctcaatcttgaagctgatttccccgtgattttacttctcgcttggtgatccacgatttaccaccatgccctcgattctcgatttgatttagctcgcactccatgattccccttgtggcgagccttattgggtttgcatccggataatcgcgtttctttttctccggtctttttcttgcctcttctgcgtctcatggcgtatggatgtctgtctttttttctgctttttcagagcccttttctgcttgatctttgtgatcttcctctggaacttgtgagagtttggccgctttatctattcttctgctgatttatttttcttatgcgagggttgatcttttagagcaatggctttgtttgatcgaactgatccgccaattgaattatcatcttattccattttcatatattctttcggttgtaagtcaccgattgcctggtaactttgtacctgggttcttgagcagatccattcttacaagaagagttaactagctgcacttccagcacggattttcatgtgcgtcttgcaggcaattgccagcgaatagactcccttcattcctctatctcgcgttcaaggtatgctactaattgtctatgctctttcatactcggctttatcagctataggtactaactagataagctctagtttcgtccatttacccttggtttgttatactcgaagtcacagtttagcaaatagtatatgacctgtgaaagtttgaacagaagcgagtagggactcaagatactcggacattcaatggatagcttgccttaatgcaatggggaatcaatatcagatattatctacagatcagacaagcatatgaacaaacaaaagtaaccagaataaggacaacgagcaacaggtaatatgagcggaaatgggggtataagttataaaagatatctgcgatgagcaattcaacacaacaagaagcggaacaaaaaaaaaaaaacaaaacaaacaaaatcacttctccaatttcctcttccgctcagcaagaagaacctcaatcttgcgaatctgaagagcaagacccttcttctcggcattggcaaggagccactcctccatgtcttgacgaatgtgccgcatggaatgcaagacaggcagaataggcacagaggacagaccgtcatcgactccgttctcgcgctcattatgctgccagcgctcggcaccggggttgagcaagagatcgaagacaccggcccagagttcacgatcccagtatcgtttcagagactcgcggatgcgatagttgcggaatgatgggtttccgttgttgccgtcgatagcggtggattcgatgtatttgccgaataacagcacgtggatcacgccagcaataccgtacagatcaatatggtaggtccaggggcgcatctcgcggatttcattgcactcatgcgcaccggtttcccagtccgcgatgaattgcacggctggtgagaatgcttgcatgtcgatgctgcggccgaagtcgatcagtgctaagcccttctgtcgccagccgtgagagccgcttggggagtagtggatgctttcccggggatcgaaatcggttttatcggcgtcaaggtcgagcagggaaagggccttagagggaggttcgttgggattgtggtcatctaggcggacgaggcagttgtcggctttgatgtcaccatggaggacgccgttggcgtggagtgcttcgacggtgcggaatagctcaacggagaagaacattgctaaaacctcctcaagaccgccttcagaagtatggttggagttgatggcttcattgcggacgaggtttacgaggtcgagtatggtaccctgtcctcgatagtcctccactagaaaactttcacgtcggtggacatgcaattcgtgcgcgcgaacaatgctatcggtggcgcgagaatgatcaatggattgtcgtaggcgaatataggctgtgcgaatcatataaaactcccacgcgcttgatggtccattttcgaccttgactgcttcgaaggggaatcggggagtctcataagcgttcgagtttctccgtcgggaaattttgctgctagggcttgtaccatcgtcggagtcagattcgtaggattcaagactgtcaacactttcggcgagatagacaggggcatatgcaccggctcctagctcacgtctgataatgtagcttcgttccgctcctggaaattcgaggataggcgtgtcaaatgcgccatccccaccactctttgatcgcctggtgttggttttgacgaatttctgtatcatcgaagcatagttactatcttcgacgtgaccgtgataacccgtgtaggtcgcaagtggcttttccaaggaattgaggattgtgttgcgaatacccttgtcagtcggattgcactgcacatccctgattatcggttcccgtctccggagcttaggcgcgagggccttgaaggccatgggactgaatggtacatcggctgtagacgcaatagtatgatcttcttcgtatggcgtatctgtccccactagactagaacgaaacaagttaccggccggtgatcgtggcttcgaaggcgttttcgcgttataaatgctgtttcgagcggctgtcaaagaaggaatggattccgttcgctccacgataggtgtcataaagggaaggcgattttgggccataattgcagggtcacggtaggtaccccatggaggagcataatcctcgggcatttctggaatgaatcctttcctctccggtgttccttgtgtcgagctaccttccgctccatcactaacgacagaatgtgaggtgacttcataattttcgatatctgggatatcacggtctgggttgaactccgtccaatcgctttcatcgccatcaacgctctcagctcgtgtggtgttggcatagtcggtgtcatcgtaggatttgtggaatgtttgtgtctcctcgtctccaaagtcgctcgaggccgctgatatgtgccctgtgcatgtactatctccattactagcgcagtcgtcatcttcgtaatcgctaccgcagaagctatctgcgtctgcttcagtctctgccttcaatggttgattgaagatgctatatatctcatccgtcgctgcacgagtgtgcatggtcattgtcggttcccgggtactctttcgccgcacctttttattattggtcggggagtcaaacttcattttcactgcacatatgtgagtttattctgcccaaataatgacaaaccgatagcacttacctgtttgtgtctgtgttgtttcccctttaatcttagtgcgactcgctttgggtttgcctccatggccttcatgttgataatgagaatgaccgtgactagatgtagtaagattctggcctaaatgctccggcaagtcctctggtgaatgagatttccctagcagggactcagtactgcttgcgtttccagagatctgttgcaagggttctttttgttgccgccaattcttgcccatccaaccacgcttgatagccctaagctcttcaaagctcatctcatgtgcagggttggtgcggtcagggtatacggattccaggtcgacaaatacacgttcccgtcggccggttcgggggttaatcgcttcccttacgtgatgttcgggtagttcttttggtggaattggttctttgaaaggaagatctggattggactgaatacataataaaacaccataggttcatgccagcaattagtcctgtgatcgtaaatatgtggaggtctgaagaagcaatgggtaacttggaatgggaactcacctcgtccctgaagatggccatcttttgtgttggcgctgctttcttcccaaccttcagtgtttctcctgtccatggctttggctccacttcgttctccttcttgcggtcccgaatcgatccaatgctatcccatccctttgtcgacccaccagttgcgggaccgggcgcagcagagtcagcgtccgagaaaatagccatcttaggctttccggacttggttttcgcggtaccgcccgtctgaggcgagggccgtgaagcttgtggaccagcaggggcatctgatggcgcgaacgggttcatcttggcggccagcgcgggacggacagtcggcaaagcaggcgacgagggcccggtatcttgttggcgttggtcgtatcggaattgaaactcgctgtacttgcgtgccaatctctcaactggtcgcgcctcacggtccatgccgagcttgtacacttcatcggcttgtgaccaccgaccagcaccctccagccacccggcaaattcctcatagaaaagagccagactttcaccaatttgatgacgtgcaaggaaggcaaatgtttcgcgcggggcatcggagaagagtcgaacataatgaagccataatcgtagataccgagggtcgtttctgtagtgtgatgatgagaggaacgacttcgttgcccgttccaatagggggagaagaccggattcggtggtcgcttgtgcggacggatacgcgttcagagtccatttgacataacggtcataaacatcgagcggatcgtccgattctcctatcgactgcaattcactttcgaattcttggcgcatggcatcattgatggtcctggtgccattcggcgatggcgaggggatcttgtcaccattgctgccggctgaaaatatccgggcgagttctctggctgatcggccaccggggagtgattggacgttttccttttgtgcttcgatgatatcgaaatcgaccaaatcatcagaggctgccatgttagctacgacgacagataatgtgagatcggagagatcccaaattccgtcgaagaccgaaagttcaaaagagcgagtaacaactctggcggggctgcaaggagattgattctgtggctatcgataaacatcacatgactgttacccgggtgacaggtcacgtgtcccagacaacgtctactgtatcggagcagagaatggtcaagttaggctattcaacaagctcgatctattttatgaccacatacttcatctgtattcctgtgcggtatttgtgggtcttcagagtgtgtagggtcccgtcttgatcaacgaggcttggcaacatcaacaacctcttcgggtcttcaatcagggtacccactcagctcaagaggctctacactgtgacactttcagtgctatgtgttgtcaggaatctggatcgccaaggtgcgaagactctgaatctaaggtcagccataaacggaacctcagccatggaacatctgagctctcgccacccagacgatccaaacgacagaaatccactaccaatttgaaagaactttcttctccagaagcctcggagtcagaggccgaagaatttactcctacagttaaaaacgaggttgacaacaaacctctggttgatactgccaaggagaagaaaaagaaggctccagttaagaagtccaacgaagacgccaaacccaaaaaggcgagaaagtctaagaaagaccaagaacttgagaatatgcctctggcaccgcggactaagggtctgcgtatgttcgtcggcgctcatgtcagtgctgcaaaaggtcagtgttctccgcatctcatcgtctcaattcggtaataactcaattcttatcgagcaggtgtctttaattcgatatataataccgaaaatatcgggtaagttcgagtgtcttccaattacatccaatcatgaaatagattctaatcttgcaactagaggaaatgcatttgccttgttcttgaagtcacagcgcaaatgggacaatccagctctcccggacgaccagcgcgatcaattccgtaaactttgcgcagaaaagggatatgatgcaaccaagtgaataagccccatctgattggactcgaatgggtcactaacatctacccagacacgttctgcctcatggttcataccttgtcaatctagcccaaagcgataaagtaaaatccaagcaagcatacacttccttcctggatgatctgcgccggtgcgaggcacttggaattacactttacaacttccagtgagtcaaccgcctgccaatcatatcggcgcatactgacgctctccagccccggaagtaccaatcagacacctctacccgaagcactttcccggttggcagagatgttagtccaagctatcaccgaaacgacaaccgtagttcccgtcctggaaacaatgtgcggtcacggtaacacaattggcggtgcactgtctgaattccgcgacttgctagctctgatcccgaaagagcaccattcccgcatcggcatctgtgtcgacacctgccacagctttgcagccggctacgatttgacatccccagccgggttcaaatccttcctcgccgaattcgacgagctgatcggaatcaagttcctccgagctctgcatctcaatgactcaaaggcaccgcgcggaagcaagcgcgatctgcatgctaatatcggcacgggtttcctcggtctgcgcgcatttcacaatgtcatgaacgagccgcggtttgaagggctacctatggtccttgagacgcctattgaccgtgtcccgggacagaatgtagctactggagacgatgcggctgatgggagtgagagtgagtctgggaaaaagaaactcccaaagaagggtcctaggggacctgctggtgcaggcggagctgctgttcctgatcagggtgtgtgggcgggtgagatcaaactacttgagtcgctgattggtatggacccggagggcgaagagttccgggctcttgaggcccggctttcggaggagggtcgtgcagagcgcgagaaacatcaggagcaatatgagcgtaagctcgaagcggacgagaaaaagaaggcgaagggaccaggaaaggccaagggacagaagagtcttatggacatgatgaagagtggcgctgcgaaggagtagacatatattcttttttgaacgcagagcagaggggtggcaatgcgatgaggaatacttgctgggtgtccctgtgctttctacatcatcccgaggactatataataatgaaggatataatcactacaacactctcagggtttcaaaatacaaaccgccaaaatgtagcccttataatagctgttgaaagtagaagagtcgattcaattgatggtatcagttaagccaaagccaaaatccgcacaagccccttcatgcaaatagaaataggaaattgtgttccggtcaatcaagagttcgaccaattcatatctgcgaaagtagacatagacatgcgattccaagagccactaggttctcctcgagtaggtcacagaccctccaacaacgaagagagtataggtgacataaaaaaaaacaatcacatgcatgtgcaatataggtaaatgaagataggagaggggtagttaagaatgagtgtgaaatgctagtgctgggggacattttgatcccgaattggcgaaacagacgagctcgattgcaggcccggcgacgcttggcgagcaggggcatgcaagtggggaaaccctgcctcggccattgtagtgatagtcgcaggtgctgatttaagagaaggaccatcgttttctagaataatagaagtcgatattgagagaccacgcctggcaccactggaacgtacccgggctgatgatgattggtgatcatcgttaaggtaactacccggtgcagggctaatgatcctggagtccggataggcaatttgacgataatccccgggatcgccagtgctatgctcaccttcgtcggtgtcagatgcaggactggactcgcgactccaatcatcttccgggagctcgttgcgcattcctgaaattttcatgtaattgtacgctgcaatgctgctgatagtgacgaccaaaccggtcacattgacggttgtgagcttatcgtggaagataatgcccgcggcgctgattgtgactacttccttgaagataccgcaaatactgagggtaacaaccgaggagcgctttagaagcgcgaactcggatgaaatcatgcagaatgcaagtactccagggaaaatcagaaggaacgaaccaaataggttcccatgtttgctggcgagcgcgaggtatccttggtaaatctcacgaggaccctcaatagatagcgcgatggtgatgagtgaaaggaacatgataggagtcaggagaaagagagttgagaatggattggaagtagccgggtggcgaagcagcagaatttgtgtcagaccccatcggaagcccgaaaagaacgcggaggcaatgacaagtgcgaagcccagcgcattgaaagctgtctctccagcgaccatcatcacgacacctactgtcatggtggcaatgatgatgattaattttgtcgaaggtgtttcgagacggaaaaggaaggcgaataacaggacgaaggcaagtgcagacgatttgcacatggttaaaaaagtcagagagatgaacttcaaggacatgtttccgagaccaacgtcaagcgacgttgctgcaccgcacggaacgaggcgagtgaagtagaataatctggaaacgaggggttgtggttcctcggggccatcgatgggagatgtagccgcagaccctaccggtcgtcgcggacggagcgatggaaagatccagagtattatagaggagagagagaattggacaaccatgtgtaagctcgttgtgaaaagagggaaagggaagacgacatcattctcggagaacatccatttgttgtactgcaaacatgacagttgttagtttccttcttgacttccaaatatactggaaagaaccactcactattgaaatggacagtgagaagagataccatagcaagatcagcccgccgttgattaacagcttcttgaccacatttctgtccgacagaatctcacgaatagtaccatggctcttgacgtccgcgattctagcatccaacttgcggcgctgctttcgccgtcgacgtcgctggcgtttttgatgtgttgtgagtccggtttcctcgtcatattggtcatcatccgaactcatcgggtccaactccagagtctctgcagcggataagacatcggacgcatcggtatcctcttcggcggtcagaggttcttgttcttcgcgtttgtgacttcccccgtctccatgcgaccagagtgtgtcattgcgctctgtcgaaatcggttgtgaggctcgccctgtcccggtaaccatggagcttcgccgacggtggtgggcgccgtcggagagccccattttaatgactgggacagttacgaggtataaaatgaaagagaggaatcgagatgtatctccattaacgtgggaataaagtgtgtcacacgacagtacacgagggcgaaaagcctcgggggggtaggggagtattgctgacaaagaaacaaagaggggagaatccgaagggaagaagttaatttgaaaggaagatccaagtgagagctcaaaccaaaaggaaaatagaatgaaaaggaatgaaaatgagggaaatggccaaaagtgaagtccacagggaaattcagaggaatggcaaaaatcgagaaagtgaagggcggtgatgtttctcttttcgctcttcttctcctttctcgctcctttccctcctttccttcaacaacaattcctctcattggttacactttctatatcggtctccactgcccggtcgatccggggtcaaggggggaaaaagaatatcgagatggatttggatatttcagatatttcgattatttccgatatttccgatcttgactgcttcgagtggtctgagtggtcggagagctctgagagatcttctctggtttcgattctcattagtggaccgaaacctccggccttgacttgcgagctgtgaatgaaagcccaacatccacaaacacttcacttgccgcggtggcctcggattgacatagttcgttggtgacgggaaaggctgggctttcagtctcaatatgagtctctttgagaaacggcaatcggtctctcgtcgagctcatcaagtttgtctcctatgaaaaagaagaagccctaatccacccagcatagccatgacctcagattcaaccattatcatcatcatgtcgtgtctcgggaataatatatgtcggaggatgcggatcgcaagtgacaacggggggcattgcatctacctctgctttcatcttcttcatcttcatcttattctcttccatcttctttaggttgatgctgcaaaacagcatttgatcttcatcaaaaacttcaccagtcttctgaacttgcatcagatctcttagatatttcgctcgcattgccatcatgactgaacctgcgtacaatgccattgaggactatggcctggtcggggacatgcacacctgtgccctggtcagcaaggccggtagtttggattacatgtgctggccagtctttgactctcctaccgttttctgtcgtctgctggacaaccagaaaggaggcttcttcgccgtgaagccctacaagacggtagtagatgctcacagcaagcagcggtatcttccatactcgaacctgcttgaaaccaggtggactgatgaggatggcgtcgcgacgctgctggactactttcctgtcacacctaaaaagacggcgcagtcgtcccggttgttgtcaggatactgtccttgcaatgaaccgggaaccaatcgcttcaagtcaggactgcagcactcgggcctgatcagaaagctggagtgtagccgtggctcaatggaattgaaagtggagttattccctgcttttaattatgcacgagactcgcacaatacccgtgcaaagctagaagacgacttggacaagcaccggctgcagactgtccacttcgagagtgagacagagcggctgcaactcgagatctttgccgattcacgggagccagataagcttggtttcccctcggcgtctttgaaactggaagaacgagagggcctccgtggccgcggattggtggcctggatccgtttgtcggcgggccagacccttcatctggtgttgcatagtcccgagaaggctgtccccagctcggccaccatggcagcctacctcgcgcgaatggaggaggaaacttccgactattggaccgattggacacgcaagtgtgccttccgtggtcattaccgagagacagtcgagcgcagtctcctaattctgaagctgttgacctacaaacccacgggtgcaattgtcgctgcgcccacgttctcgcttcccgaaaatgttggaggctccagaaactgggattatcgatattcctgggtccgtgacacagccttcacgctatatgtctttctcaaaatgggctacagcgaagaagcggaagcgtatgtcaacttcatcttcgagcgggttttcccgcatgcttgccaagatcaggaacccaacagcaaaaggcccttcttgccgctgatgttcactatccgaggtgagtacgacattcccgagatggaattggaccacctcgatgggtacaaaggcagcaaacctgttcgcattggcaatgctgccgttttccacacgcagctggacatctacggtgaattgttggacagtatctacctgtgtaacaagcacgcaaaccccatcacctatgaccaatggaacgctatccggcgaatgattaactatgtcatcggtgttcggaaccagaaggatatgtccatttgggaatcgcgtggtcagatccaaaactttatctattcgaagattatgatgtgggtagccctggatcgtggaatccgccttgcggagaagcgtgctagcctaccatgcccggatcgctttgaatggatccgggtccgtgacgagatgtacgacgaaatcatgaccaaagggtacaacgaagagcgtggtcatttctgccagagttatgagagtcgcgaggtcttggatgcgtccatcttgattgcacccttggtattcttcgtagcgcccaatgatccgcggttcatcagcacgctgaagaagattttgcaaagccccgagaaggagggtctgtccagcgccaagatggtgttccgatatgaccacaagaaagccaacgacggtaggtatcgcttgtctattagaactctacaacaagtgctgatactcgcgtttcacaggtatgacagggggtgagggtgccttcatcatggtaaccttctggcttgtcgaagccatggctcgtgtaggttctatggaactacctaaaaaagcaacactgaactatgctaacctgaactgaatctggaaatacaggctgccaaatatgatgtggccattccaaacatctggaaactcgcacttgcgcacttcgataacatcctgtcctacgcgaatcacctgggcatgttttctgaagaagtggccatttctggtgagcagatgggcaactctccacaggccttcagccacctggcttgtattagcgctgcaatcaatctgggaagaagtggacgaatcggcgaatagagtcatctctctcagtggcaacaacgatagactaactataatactgttgtttttgaaccccaaaatttgtttgatgcaattctataattttctgcttacagatagaaaaaaaatacaactttgtgcctttttgtccaacactccgtacatatgtaggcaatgtaggcaatgtagcaaatatagatcatcggcctaggccagcctggaggtgaagacaaatgcttacataatggactagatgatcacacgggagctccagggccggtggctaccccagattctctttgttcatcatctttgactgtctttgttcaagacaaacatatccaaacaaaggaactgctagggtgctgttatcttcagcttctagctggagatgttcttcgccaccgaccctttgtgccttattacctccgtgagcgcgtacagggatccccacctgtctaatggcaggcgccagcttggattgggctgataagcctaacgccgattttgccttgtcatcggatgaagaggaatttgtttccagcccaagcactgcttcaagggagcttgaaggccctgccaagcaaaatttgacgctggctttggggaagttgcacttggagcaagaggacttgaatcaatcctctggacaggactcgactccaacaacaccccacatggaaggcctaattcaaacccccccagaacttgaaatggccaaaaagcctctgcagctactggacttacctttggatattttaaaggagattatcaaagaggtaacactggtcttccccgcagatcatgaatagatagcttacagttctggtgtaccataggtgacccatacgactgatctgacctcgctcgctcttacatgctcctctcttcatttcttagccattccgcacatgtactcccgtttcgacatcgtctggcccgagtcgctgaacccatcaacggatgactactcgggggtggacgctctgtcttatggtttgtccacattggtcatgggcgaggatgtatttaatcagccggcgctgtttcaatctgacaaggtcaaaaatagctgcgtgaattgcggttgcaataagcctcatcctcagcccgacccggaccctggggacaacggagatcgcctccggtcgcgacgaggcaatcattatgcacagtatacccgcacattctctattggaaatggcccgctcagttgggtacaagaatactcggtgaccaaagaagtgggcaagatgctagggacgctagtcgctttagcagttgcacggatggtgaatctcgaagccttcgtttgggacatgccgactggagtggtacgtgaaatttggctcgcgcttgcgtcgttggcagatagaccaggacacgattgtcgcctggagcgcatttgggtgcgctggcatgacaattcggagaatgctctacgcagttcatcggcggcggcaacgaggctctttcagaaatacaaacacgtggaacatccctccttgtcagtactacctccactcaagaatgtgactgttcttgacatagatgaacccgcttatgtggaagaactggcaattctcattgagcggtcacgtttccgtctgtccgaactccgcattggtattgccgaaaaggcccatatgagtccgtggctgttgtgtgggaaggactctgatggctcaacgaattggcctagagctgatggtgtacttggcatcttatcgcggcggcaccttgacaaaaaacaggataatgctatagtttcctcccttgaagataaatcgatgccctctgacgaatcgataaacaagtcactaaaatctaccgaaattgcggctccattgactccaaatagcgaggagcagcctcccagcaccaccaaggacaagaagtccccaccaagctctggtttgtccaaccggagcgcccgctcacagccacctccctacaaatccgactatgagatacttcatctcaaagtactcgagctagaacgcgtacctctttctgtgccaaccctactgccagccgttgactggactggattgactactctcactatcatgcgatgcgatgatcatgaaaagctctggagggctctccgtcggaagtatgctcctcctgcgacgccggcaaaacgcccacatgatgcagagcgtcgaacaaacgccagctcagttgaatatccactaaatttgaaacatattcgcacggacactgtttcgccttatcttatactgttcatcaaagatgcgctggctccgaataccctggagagtgtgtatttgcatgaagccccaggtcatgaatctgctgtgcatatcgacgctatttacaagcacattctgcgaaagcacaggcggagtctgcgaaaggtgttgattgacgccactgaccgtataatcggcgctggatattcaggcatacgatggcacaagtggatgttcacccacgatatggtatcatttgtcacaagtggaaagatgccgcagctgaaagagctgggaatagcgatgcattatcgcgattgggtaagaaaacgatcaccagcattggatactttgatcacacctgggggcttgtgcttgtgctaatgatgattctgcagcatttcttcctccagagattgccaaacatgccccagcttcatgctttgtatctaccacacattcatcatagtgtccatcgggacttgaaagagcttgcgctgcaagtcttggacatcgtcagcatacgtccagatttgaagatcgcctacattggtctccacatcaaatgctaccaaatccttgaagcaagacatgacgataacccactagatttcgacgacaaccccgcgattgaacattccccggagcttagtgaagatgaggatgaagggtgggccaaccccaatcacgattctgaaggagacagcgatgattccgacgatgcctcgggggcagctgacacagacctcctttccagtgacccggacgactacgacactgaacctgacgaagaacagggtgattcgcggattcgttaccggctacaggagattctattctacgacgagaaggtatcaattttcaaggcgcgtcatggtgttttatgatctcatcttggcttgcattctatatcaggagttgtccggaccatttgcggcgtttaaaggggtacagagagtttgcacctacgaacaggagataccatggctttttagcttagcactaaggttatttgttaacctcggaatgacacgttattttgagttaaggttgtgctgagtgggccactctaagtgggtcaaagtggtacatagcggattccaataaatcgggtgtagtacatcgtcaaattagaaatacactttgctaagttcgtttcgctgggactttcgctcttggttcgtgatagcgtttcttcgtgcaaaaaatcctccatcgcgaaaagaatggtaagtcacatgacatggactgaattatcttggcttctcaatattgacgcttgtacttttctcttaggagagagctaaacaagtgtggctcctcggggaatcatatcaacttagcgaattggatggccttgtgccggccatagttcattcaaatttctgccctatcaactttcgatggtaggatggtggcttaccatggtggcaacgagcaactggaaattaattccggacagggagcccgagaaacgctgcaactacattggcgctgttcacttcctagcaacacggccagctatgaccggtctcgaaaatgttgtcacatttcgatgatttcgaggcggacagacccccacatatcagaacattttggcagtctcgcaacagtcgttaccgaagtacttcatcaacataggatcagaggttcccccggacttttcagctttcgcggatgtcggctcgggtcttcgccacgctgggcaagtaccgggttgataatcaattatttgctcactcatgcaagtcataatatcgtagaatttccttatttatgctaaggtaaaaccatgggtatctgagagagagcgctagtgttcaattgttatatacatggcgggacagattcgttcatgcaaactcccggtgtgcgttctcatactgggcacgaatcagctcgttctcgatcacacgtctcttagccttttcttcttcgctagaattgtctttgaacacatggtccatctgctcgagggttcggcccttggtttctggcacaaagaagtaagtccacattccggcgagtaagcaaaagacggcgaagaagatgtaagcaccgtagccggtgtcttggacgagaggcggggtgatgagaccctacagagataatcagtatgcttgacacaccgagcgaccgaataatggtagcgagaaacttacaatgatgaagttgttgagccagttggagcaagttgaaagcgcaacgcccttagcacgaagggaagaagggaagatttctagaactgtcagattgatgcttgtctaacaccataagagaataaagatacgtaccggaaggcagtgcccacgggataggaccccaggaagctccgaaggcaagcatataaaagagtaggaaggccacactggtccacccttctgctttgtgggacggccaatcatccgagtaaattccaaccaacgcagcaataacaatgtgtgatatggccatcagggctgcgccacctagaagcaacttgcgacgaccgacgacgtccatagtccagatactggtagtgacacccaccaactgtacaacgttgagaacgccggacatgataagttgcatgcttgtgtcgagacccatcgtggcaaagagagttggggagtagtaaataagagcgttgataccgatgaactatccatatgattagcatgtgtcggttatctccacgtacatagaactcacctgttggaagaatccgagtccgacaccgatgtgggtacgacgccagcagccctttttgaagcaatcggcccacgacgaaatctcctgcagaatggagttctttgtgccaccaccttgtaactctggatgcttttcccggttcatttgctggtggaagcgcacttcggcctggatatccataagctcctgacgaacgcgtctgtcggaaggtggcaggcaacgaagtctgcacagactgtcgagagcttcctcatcgcgaccctttgaagctagccagcgaggcgagaacggaagagcgtatacaccggcagcgaggataaagcccgggatcatttggagcaggaaaggaagacgccaggcccattcaccgtccatgtatcgtgtggcataggtaatccaaaaggcaatgacaattccgaggacgatacaccattcttccataaccaagagggtaccacgacattcggggggacctaataggagagaccggaataagtattcatgtcatatgtgtgtgaggaaggggaaaaaaaagaaatcacatactgatttcggagatgtacaatggtgcaaccatcgacaacattccgattccgaggccacctatcagccgggccaccgtcaacatgggataactgatggcagcagtctgaaggacagagccaacagtaaagatagcaacagcgacgagaatcgaataccgccgcgagatcttatccgcaatccagccctgattgagagcaccaatcaaagcgcccagctcaatcatggccgtcaacaatcccttcgcaaatcccgagcccgggttatgctcatctatccgcgggaattccgtcaggaactggtccatgaccagaatcaccgacacaacaccttgatcataaccaaaaagtaaaccacctagcgttgagcaggcggcacacaagaccacgaatgggctggcaaccagaccgcgcagaccgggtgggccatagggctcgcggtctgagttaatgtcgtcggcatggtgagagaagccctctaccactggttcatcggatagatctttcttaggaatatcatcagtcattttgaatggaaactggaagaaacttgaagaaacttgaaggttatgtttctttgaagcggaagaacgctctgctattcaaactctacccggaggcattccggcgatatttatacccatttcccccaataacctaaccggggtagtgtacaaggtcggttccctccgtatatcgggacctataggaagtctgggggggtccccggtccaaaaggccaatgagacaaaggcgtgataaccaagttggggtagatgacggagtgctagacggttcggccagcgggtttggggaagatcggcgctataggattgtggggaaaacacggagaagagaaataatagcacgtcgtcaattggtggcggctattggcatggtacaaggacgcttgtcttcctctgagcctatactcggcctttgacagatagacttctctcagccccagaaccattcttgggcttggccagaccgagacatcttgcatacggaatcggcatagaccaaggagtcatagggcatactccgtacagccgatttgctctaggtcctgttctattagattgataagcttatacagtctttcgtattcgtgtctataggtatagctagttcatacacactcgggcattcaaccaaagatcgccatcacctatcacatggaatgttctggacaataccagcatcgaaggtataccgtataaccgagccctaacaccctcgggccggacatcactcggaaagtcaagtgacttgtgagccgatcttatcccgtgatggtagttagtgtcgtgtgagacagtaagacataggcatgataggatcctttggatgaatcgcgacactaggtataatagtagaatccctgtgataccttgtcaatatcaaaccagataccccacggggaaaaaaagaggagaacaggctttccaacatctacaatctagctctttttgatagaaaatcggaattcgttgtccactttccaacctgagcggtgtccattgcggtaaccattttcccccctgcggattccagttcccgacttctcccccgccactcccaacctgcaaccttcggacttcccacttcactttgaaatcatggcttccttcatggaagacctgtggtcgagcatctttaccccaggacccactccaacccttttgattgcgaccaacgtcactttcgccgcactccagcttatcttccttgtcctcctcttagccacctacagcctccatttcgtcgccctgtccatcatcagcggtggactatggtggtccatcaactggttcgctgccgaggttcgactggcccagcaggcgcaggaagcggagaaagaaaaacaagggtcggagggtgacgcgaaaacgcggaagagtcccgctgtaagagaaagcgccgacagcgaaactgaaaccgaagtccttgtcgctaggaagacagacgataagtctgctcctgtcgcgactgggagtgcaacgtccgggttgatgcccacggcgcgcgatcctaagaagcggctcagcactggggatgggtcgggctatgggagcactgatagcgagtgggagaaggttgatgatactcaatcttgagtgatatgtggtactcaaggatacacacttgcttcgggatatttacactcgcctcggtggaacactgttgcacactgcacgctcacccaggccccggacatctcgacgaatacgtaggacgcgttcatggtgatacaatccagtgtcgaccttccgtgtaccttggctgggatttggatttgattttggatttgattatggatttggattcgtatatacgcaatgccctcttgtctgtttgtttcggagcgataccccatactatgtagatggtgcaatttacagcagctcgtgcttggttttgattttgctaggagcgtgatatccttcttctctctgaacacattcattaacaataacattcaaaacatcccatccactcgtacttcatacaaaacaaagtaaacagaaccggtggagctgaatctttagaaagcatccacgtgaccttcccccagccaaacaatgaaatccgtcgcaacataacataggcaaccatcaccatcgaacacgatcgcagcagcaaccagacacactagctgcatcccaccatgtccgatgtcccttgatcaaaatgctctccaccgtacccctcaatgtgggacgtaggcgcgtctgcggctccgtcttctcccccgcggctctcgaagctcatccgtcgaacacgaccgcggattcccaacgcgaacagacaccagtcgcatccttccgagaatcaaccgattcctcgtcaaccttcaaaacagactcgcaatcaacctcattcgcgacgattgggggattgacggacgctgcatccccagaggaagacacattaaaccaggcgcggcagacggtaaaagagtttctatctgtgcccaacctgggctttgaattgctttacagcttccggaataccgatggaagtcaggcgttgaaagaatggaaccggctcagccctccgtcgaaggagacgaccgaggctttggagtatcttatgcgaacctctccatggacattgttcgaatggtacgggaatgatattcgaaggcattttctagtcaatttccggactggcctgtctaaggtatggacgttatatgtcgttttgaattcaattggtctgtctgtgctaacggtcttatagatgttaaattccacgggggaagaagacctgctccgaacaatcgtggactgcttacagcttgcgcgtcaaatttatctcgctcccgtcgtgcactatctacttccgttaatagctactcaccaccaaggaggagggcaattggctcaactacagcgtgcctttcatacagtagttcaatacagcctaccatggaagaagatttcaccgcttctggccagagagcttacgcgagatgccgcggttatcttaggcatcgatgccctggacgaagattccgatgcggacagaatgagtctcgatggaacggagatggaaagagcatactctgtctcgtacaaagagtggaggcaagaatcacccgaagcccaactacacatgatggtcgagggtgaagatgactgtgtgacctttacacgggatcggctcttggcgtttctcgacggcttgcagcttgtcggacttggtggtgaccaggcccagaaggtgttcgccaatgtgatgaacatcatgatgggagacttcattcgtgctgcatatgccggcgaatggcagtcgccttcaactgcgccacagcacttggagcaatgggttgaaaatgtctatgcacggctcgctgcgcaggttctagccatcatccattctgatcccgctggaacccaatccggggccatggaagtgagcttgagggacgtggagaagtggcgagcaatgggtatcgctcggctgggcaagcttcgagtcagcgagcttttcgacgtggttgttgattggcccgtaagcggcggggcggtggaggatctgcgacgcttcacaaacaactcgtctggagcacgcatgtatgtgacgcatttcttttctattaacttgctccagcgtttgttgcatcccggtgcttctacagtcgagattttgcaggtttacatctcaatcattcgagcattccatattttggaccccaagggtgttctactagatcgcatcgctcgaccgatccggcggtacttgagagaccgcgatgacaccgtcaaggtgattgttagtggtctattggcggaccccgcgacagccgacggaccgacagctaccggcgacaacttggcagaactggcggcagagctaagcaaggtccaccagcattctatgcaaaacaacaggagcgagctagactatgacgatttatactggttgcccgatccagttgatgccgctcccgactacaggaaatcgaagagtgcagatgtcattgacagtcttgttagcttattcgactccaaggagacctttgtgaaggaaatgcagactctcctcgcagaccgcctcatccaaaaacgccagaactacgaccaagaaattacagtactagagctcctgaagatccgattcggcgattcggcactacaggcatgcgaggtgatgctgaaagatatttccgactcgcggcgtctcgacctcaccgtgcggaatgaccagatattgtctggatatcgtaagcaagcaggtgtcggaaaactccacgccaaggttctgtcacgcttcttctggccggagttccaagagcaagaattcaaggtccccgacgaaatcaccaaactgcaagagcggtacgcgacctgcttcgaaaagcgcaaggattcgcgcaagctcaaatggcgcaacggcctgggtcaggtcaccgtcgagctagagctagagaaccacactttcacagacgaagtgacaacctggcaagcaaccgtaatctatgccttccagtctgactcgagcgaacccgccacaagaacaattccggaactcgccgaggagctcgaaatgacagttcccctagtacgcagtgcctgtctcttctgggttagcaagcgcattctcactgaagtacaccgcgacaccttccgcgtgttggaaatcctccccacggaagacgaggaacaccatgcgcacggaacgggcgactatagcgacggctcagacagcgaagcaggcgacacggccaatgcagcggcagccgccgaagcagcagccgccgccgcagcgaaggaatccaccgaggcagctgccatggagaaaatgaatgtgcattggcagtttatcgtaggcatgctcacgaatcaagggcctatggctctgaatcgtattgtcatgatgctgaagatagctgttcctggcgggttcccgttcagcaacgaggagttgcgcgagtttttgagtggtatggtttcgaagggcaaattggagattgtaaacggggggaattataagatcgttcattaacatgggcaacggggcgtcgcatgcgagcttttttatctttggcgttgctggaaccgatgtacggaatacccattaaagaatacatgtatgatttacgagtgatagattacctcaattaggtagatccaagccgtggagtatctagtctttctctaacgcgcccctttttcttgtctacatgcaacatgttagtgaagttactgttctggcatgagatatatatagacgagccccaccacctccccgcctacacaaaccccaccaaagcccaatcccaaacatctcagagaaggaagaaaaagaagaaaaaggtatcatttcaaatctataagccacgacctaaccaaagcgagcatcattccgcatccaaaagcgcaacaggaacctgattatcaacctggatgccaccgcgcttcttctcatcactatcccagaagggcaacttccagccaccctcactctcaggcgtcgccagccaaagacgcataaggtggcggcggggggcaggaggcgcgtgatcggtgtactcagtgcgggcatgcaggacgtgcgcattcgacaagaactgaatatcaccaatatcgagaatcatgtgcagcgacaggcgcacgcaggttgcttccagcacgcgcagggcttcttgctgagcttctgacagcggggggatgattcctgcgtcgctgaagcgggtgagggagcggacgtagtacgggtcccatctgtttctattgttagatgctgaaatattgatatgggatatgggtggggggagaacttactttgtgtagacacggccgttctcgccgggctcgaggtacaccacgctggtgcgaatgtactcgtcctgtcccttgcttgtctcgcccttgcggtcgaagtaccagattggctctgtgagggtcttgagaacgtctgggcgttctgcggcgagggtgttgtagacggagtgggaggagacgaggtctgattcgccgccctcgagggccttggcgatgcagaggagaccgacgatgtcgcagtcgtcagcgtggaagtattggctagttagggattagttgattgttcgtttcttgttgcgcattcactagagaaactcaccgagcattggtgcggtagatgcgcactttgtcgatctgggtggagtcctcgccgagatccttgacgtggccaaggacgtggccgcggctgttctggctaacgaagtagccgagatatgtgccgagacccatgtatgccacggcggacttgtggttgccccatttctggacagggaagcccttgaagaggatgaagcccttgccgtcgatgaggtctgcgcgcaggtcgtgcaggtaggcggcgagagtggggagttcgaagttggtctattgaagtatgattagttctgggtttctagtttcctagatgtgaattgttctcacctttgagattccggtcagcggggtcttggatgcgatgaaagcatccgatgccttgctcagctcatcgatctgggcctcggtgaagacatgtgtccatttttctgggtgctcgcggtattcctcagccttccacactgttgggccggtgatttctttagggaacttttcgaaggggacgagctggtcgtatagcgggggatgttggccagtggtcttcaatccatctgggaacaaatcccacgagatgggccccttgagatcatgaggggcagttgggagaggggagatagcagcgggagccattatgaatgatttttagagaggaggtatgttgtacagatgaagcactaaatgaagggccattggtttttatttatattctgtcacttctattgtcgacggtgagcaatgtagtggattatatggcgtgacgagatcagataattgctcttgtataacaaaacgagtgcggccaccaaagaagtgaagctgattgggggtggaagagccgatatggcgcaatttgcggggtaggatgttgtgatggcagtgggggatcacgaatttggcttcaagatattttcgagataggtttattgacgagaatgggaagatagacaggatgtagaaagacttgaatgtgcgaaattactagttgtgaagtcgcgatatagtacttgacgttgaaacaaggtcacggtacctggggagtctaggatctacttattcaccaccatagtacatattcgatatacatgcacatctctgacatccacttgcgcagccagtcagagtctcggccgatagactaggccgctagactaagcttatccattgtcttctagcacaacatattctgaccacagccgatcgtaccgacaatcgtgcatgcgccgggtggtcgggttgttcccagagaggaagtgctctagacagatctattatccttgtagctcatgcaatgcatgcagagaatctatcgggcgagaggtttgagttctaccgttttaccttaaatatagttggtcttagggcttcggagagcacatggtaatccgttccttgattttaactcgcaaggttcgaatgttgcaattgataaagcacgctgtgcccctgaatatatctcgaaattctttcattcttatatacatctagccttcgaactttgcatatggtgcttgctctcgtgcttcttgatttgatacctatcaatggtctttggatacacgatttcatcttttgccttctttcctttttgcgatattctcccagctttccatttccgaataaacaatgactttgatctcttttgatgtcagtcttgctattcttcatcagctttctgcagacaaggattggctttcctatttgggatgccccaccagattactcaaatccttatcgggcgtggggacacgaacgccctttgatatcgaagttttcatttttgtgtatttgtagagttatacattcctttcgtttagcacatacctccatttgaatagatacccaagcccatggcccaacgcatgattcacgtggccgcgctagacgccgacattccatgcctctcagtatacaaagcgcggggtctatatagctcgcacttccgcgtccttctgcaagcagctgccgaacgcctgaataagaacccagaaaccctccggaacggacctctcgccatccatataaccgccttcgatgccgtaggcgggtctctgcctcctctggaaaccctacgaaccaaacctcagtcgccagccgagcttcacgccggaccactgagtccaatagacgcaatcttaatcacgggctcagcagcctcggcttatgaagaccagccctggatccatgcaatgcaatccttcatccgaacagtgcacacccactaccccaacataaagctcttcggctcctgtttcgggcaccagataattgcgcaagccctcctcagcaatatcgccaaccccatccactcaccaatatcaacattccacgtcgagcactccccagccggcttcgaaatgggcatccagcccatcaccctccagccctcctttaccgcgcacttcccgcctctcgcacgcgccacagctcagcacccattccgcatccagctgattcacggcgacgcggtggtgccgacacccgaggccgaagctgccgcggacgatgcgggagtcgcgctgccggaaccgtggtccagtatcgggaatagtgcgcagtgcgctatccagggtctttataaccccggccgagtcctgacgtaccaggggcactttgaattagatacttttgccactggggaacttgcgcaggagtttggacgtcgtgcggggtggtcggcggctgttgtgggagggtatctggagcagatttatcgttcgcgcattcctgggtttgaggatgatgatgattctaaggctgctgctgaggcggttttgttgttctttgctggggaggatgtggattctatgtgtggtattgatactgggatgattacgcctccgctggattgattgccttttttacggtcgggtagacatgaagagtaatggtatttggcgttattagctatatatttctatcagttgttgggtattgtgtccgagctggtttcgtttcggcgtttcggcgggcgagtttgttcagggtaatcccttgaaggcaaaccgtgcgccaagggtttcagatgatactgagcataggacacgaataggagttacgagttacaataatagttcgtcagctctcagccccttagtgacgacatactaggttaccgtgatcgtgttggaccctgcatggctgacacgcagctggtatgctggtctgcaggaagggattaatgcggtctgaacaaggctggaaatcgaattacgcgatacaatggtcatagttcttagatccgagatctcggatggaattaagggtagtacaatggaatataacaataagctgcatgaagctaaaggcgccttacatgaaatctaggcgataccgataagttacattgtccagaacaaagtcgcccgaagtcgactcgcaagctctccactttgtcattttaagtggagcgtgacatgcttgacatttctagtgtatggatagatagtgcagtctgataacagccttattacattattcttccgtatgctcaatatggttactactactattagtattcgatattgctcatacaatgtacctcgtacggcataccaaaacctcgaactggaaatctcagacttttctgttgatcccctgcacggccacccagaaccgggatggcgtgggagttgcaccaatgagaatgaaggtaattggagagtcggtggggactgggggccaatcatgctgcttttggatgctcttcatcggcattttgttatacagggtattggtaaggtactggtattggtgtttggtatttggtatttaggcaggtaatctagaaagctatgcctctagagttaagaataaatgggggtcagagctgacagatacttggaagatctgggaatcggatactcgagagagatatacaatatagtgaatggctacatgtacctaggtatgtattcaagcatactcatatttcaggtagggcataagaagtcacgcgctctaccccttccattgctctatcgcatgatgttccccaatattggtcgaccaagtataaaattagaaataacataatacaaccatggaaatctccaataataccatacgtaacattacgctgtaacgtggcgctagttcgccacccggagcttccctcccttctggaatgaagctcaggagctggggagagcttcagaggggccgctgatagcgcctatcgcgacatatttcggtttctttccttttgcccgggttgcgcattagaacagcgctagatatgtgtttattttatgaatagtccgaataaaaaaatcgacattcatagatgtcacataaccaaatttataaattcaatgatattcgctaagagcttcggtgttccaccggggtttccgacgaaccgtgctaatcggttgtatttaaataccagttctgtacgataccgtatcctttttttttttctttcatttttcactccttttccttgttaatttcctcgttaatttccttttcatttcctttcatttcctttgtatatcgttgaattccactttaacaagtaaataagctaaattccaagaatgggggttttctttaccagggaagctcaaagctgcacgcccctcttttggttatcgatactcgataggcacgatagccaggtattcgagctcacaactacagaactataccaccagaagtagagagggaagctattccggacgagaattaatagcagaattggaatccaacgacagatcccaaatattcacccaatcgaagaagcacggagtaaaaaatagaataaggcgaactctgcgtaattacccgtaatacccccagtgactctcccacaactagccctcgaagtactctctgaatgtactccgtatgagccgccctctcgtccttttccttttttttacccttttccaattcttcccttcttcttctctacacacagagcatgttgaactgcatttccctttcttgttcatatcaaccctgtctgtgcttggctgccctctttattcgcccctcctttttttatctcaactcccgggatctcggatgatcatatgcaccatgcctcctcgaagctcactgaccagctcgttctcggtaaccgatgccaataatgaggtggtctgtcccttgaagaacaatgatagttccaattgtcgcaagcgatgtctcggtgtgagtactcgcccccaagccccacctatcaccggcgtgcgagagctatacccgtgcaactcgggagttccaacttgaactaatccggttggtgctctaggaaaaacgctatcgctccatgcaggagcacattcgacgtgcgcacccgaaccactacatcccgaagctcccggctaccgaggagagcttcctgatgatggtgaacaccccgctcgagcaacgggtgcagctgtcacctcccgaacccgctcaacctcgtcgacctcatggtcagtttttgttttttgttttttttgtgtcttgattgccttgcttggtcgctacacgtactgacggctatgcacagatgtggcgccggaaagagacatctatgtggcggacggctccccgcctacccctcgagctctggatgaaccccacccagctgcggccacggcggcggtggctttggcacaactgcatcaccatagactggcctcggattgggatacagacatggtttgtcgctccgggctgttgtgggcttcgacccctgagtctctccacagtggcactgacctgcatttccccaggatacccattcggataccgacttgagtcatcctcgcatgcgcggggctattgaacttcccccactccgcgaccatttcaagcaggaatcccttccgccgtttacgcctcgtccgcgcgagcttctcccgtccatcctcaatcactccccgcctggtcgctcatccacattaccgccgatccagcggagagacaaattttgccgcccgcgcaaatcttccatcacccaatcggcccggaaacctaagcaggatcgccccaagtcaaaggaattcggccggcgaccaagcctcggtgaccgcaaagccctttcggcagagccgcaaaccgcggcctgggcgcaaggcaagcgctgggaggacttgattgaagcggcgacgtcggcaaccgaagtagacgatgagccatattcagaggtgagttttgatgcaattctggaaaattttctgggtactgatgcgccagttcaggctggtcggtctccaacgattgccccactactttccagcgtgacttctgccccctctggggtgaaaaatcggtcctcgctaccacccgctttccaatccacaggattgcctccgatctcttcacataggccattcccaccgcattcatacgccgcctcgcctttgcacaaatcattgaccccaccaccatacgagaatcaccgcagccgtgagagcgacttggaaccattcccatctattgaatcatcgctcgattccatgtcttcagcatcgggtagaaattttgcatcatcggtttcgggagtcgcgccgtccataaactctgattctagcccagttatgaatcttatcccgtccttgtcccagcgccaacatcaccgattttccaaccctactccggcgtctttccgcaacaaggaggttcaggtgttttgcgctcagtgcaaacgaccctcggcactgaatgagtgctatgcttgtacggagtgcatatgtggcgtttgccgcgactgcgtgggcatgttcatttcaagtccgcccgcttcattccgaaccccggggaatggaccattaaataatgcctcacaaggaccgacaagctaccctggtcctcgtgggtgtcctcgctgtcgaacggtgggaggcaaatggaaggctttccaaatcgacatcaagtgaacgacttcattaagacagcctacatttttggcattacgcattttacgactgatgtttggtacacgttcattcttatattgttatttattcttcattccatcggcatttccggttttctgggtttcttttttttttttttttttttttcactgatctggcaggatctatcatccagacgatgttgcaggagttgcttttctttttcaggccaggtcttttcggcgcaggtttccgacagtcaacaaaatcccgaagaagctggtcttcgacattcaattttctacgttctcttttttcgcattctggtggacaaatctttggtcatgaagtatatgctttgatgctttttcaagtctttcatgtgatgcaaacttgtactgcaatgatttcattttctgtttatagaagagagctgtggccatgggagacaggcgtgtcctcccacatccaattcttgatttatataaccaatctactcatcccagatgacactgctaagaccctccgcagttcccacctttccaggctcgccaacctgtagagaagcaatctcctcacccaaattccctgtcctcggatcccggcgcacaatcgcgaccgtcgcagaagcttgatttccaacggcaaccaggtctccagcacgattgatcacaaatgtccgcggcaccttgccaaatgcagaagatgagtcccgcaattcaaccgacccatctacaggagaccgatcaagcacaaccattgaatcactcggcgcgaacccctgatcactccgaatcgaaacataaagcgcattcccgattctactaatcccagccggcgtcgcaccctccggcataacacccccgggatacagcaccagtgtctgcgtctgttcaaaagacaaacacccagacctcgaatacgaaacgtcaaacaccatcatcgtacccccgatctcgttaacaagatagaacatcgtctcgccgacagcggctatcttccgcgaatgcgtcgacccaacctcagaccggccggtgccatctgtccaaaacacgccgtgtctcggcccgctgccgtaggtaatgttcacgctcggacactctgacagctttccggacgggccatcctcgatcgcatacacgcgcagtagatccgcgccgagatccggactgacgatgaacgagccggtcgggtcgaggatgacttcgtgcgggtgcggcgagtcctgctggtcgaatttgcccggtcttgtgaggttgaaatggaaggcttgcaggcttgattggttttgtttaataggtagggcgaaggttgagatagctgagccttcgctattagattgttagtataggtccacaccacatccacagcaacacaatcctaggcaaccaagactgggcatgtaggtaaggaagaaatacatactaatgcgcaattgcaataaacttcttccccgcatccgactcataaataacactattgacgccaccaccgacagtcttcgcgaccgcgccttgacgcagcgtgccgtctggtttgacatgcagggccgtcaacgtgccattcgtggaaggatcggcagttccgctctcatcggagcagtagacggtacgggtctgcgcgtctagggttaaccagctcggcatgtcgccgcaggtcttgagtgtttgtgatatggagaggtcattgttcttcagggctagggtgtagacgttcccattgtaatgggttgcccacaggtgggctggtttggaggtaataatggcggctgaggttattcccaaggcggagaggatgggtaggaggttttggaggtgcatttcagggctttggtagatgctgctacctgaaatctggtgtgatggattgatctattggtagggagtactagtatatgtagtgatgcaaagctgattggggtgggggattgggcagacgcggtaggggatcggcagtccctggctgtctaggaatggacgaggggaagaaaggggtacgagagtttttagggaccatcatgacaaagggtttttttgccaaaggggtgacattattattgtgtttatgttgtgttgctttagtctgtttccacaatgctgtatcgtgcatattaactatcacaatggctaaatgaattagggttaatcccccacattgtgataaagccacgagacagccacttcgtcacggttacatgctagctttcatcccatgttacgtgggggtctcttcgtgactgcgagggtggatcgataacctattcttcaatatatatgtttcgctaagagtcaattcagtgtcaaatcaatgtcaaaccagtgaagcaaacagcattgcacacaagctcggttccaacgacaccgagtacaagctaccacccaggttagccacatacacaatggtgttcgccttgtccaacttcaagccaataggctcgtggaaatgacgaattgccggtcctaaatgttgggcatactcgacaagagtaccagaaatttgtcatatcgtgccccaccatgacccctaggtgactttagactatctcgaaaagaagctagcaaatcccgctttattcagattcccacatgggagcaagctgggctgtttaccttcaattacaaacatatacacaacacgattcgtctttacagatcttgccataccaagtttgacatatcacttggccccggatacgtctttgtccctacacatatacatccaatgttttatagcgaatatcaattcagttgcaaaccctatctctggtgttggatatgtggcttagatggtaattggtcgtgggataaagatagtattgaagttgttcaccaaatttgacactatgaaaattgcacttgaaaaaggcgtccattgcaaccactatcttcctgcttatcattctcctcaacgctaaccatatgcatttccagctattcttattcttctccaggcataaccggacgtcttcgctttacctcatccaacaggtacagctgcagttgataatcttcatcagctgtgctagaaagtccacgtttgagataggaaaaatccattgcattttgattgccgagcgcatcgagcctttgaatttcagattcggtgtatcctttctggcgcagctttgcaaagttgtaccgctgtgtattttcaaggatagtgagcaagttgtgaaggcagcgtcattctagcccaagtcgcggagcccatcttgcatcttctttcgagggggagtcagagtagaaaggtaattggtgatgacctctgcaggtggctctctgggtattgtattatcagtgattgcgatagcatttcggttgagctcctcttcggacaggagtttgagaattttcccagtatcatcaagtatccacagtcctttggggggtggaacaaattcaggttgttcgtctgccgtgatcgaagactgaatgatggaagataacgcagagatcaaggcctggagttgtgttcttaactctacctatgtgcatatgtggacttctgtcacacaaggaccaactcaggattcaatagatgcgtcagaatgcgtttatataaggtttgcggcccaactaggtatttttgtgcaggacgtgtagggagtatatagttctaaggttcctactgatggtttcatcttaggttaagctagcgtccgaaatacggtattaaaaactgaacatgaattgattttctccatggccaaacagattagcagataagattctcaccctattcttaccctgcctattctttttgcacttaaagtcttttcaaaccctaattactttgctctatatacctctcccacagtcagtcagatacatacgaccatagggtgtggaaaacagggcttcccgtccgctcagccgtacttnnnnnnnnnnnnnnnnnnnnnnnnnnnnnnnnnnnnnnnnnnnnnnnnnnnnnnnnnnnnnnnnnnnnnnnnnnnnnnnnnnnnnnnnnnnnnnnnnnnnnnnnncgccggtgagttagtagttgggtgggtgaccaccagcgaatcctcactgttgtatgtttttgtttttatttgttcagtatagcaataatagtatgttcatcttaggccccattgtagaagtctataatgactttttagaaattaagctgaacgagacataagcacttgacgtatctatctgacgctatgaccacagcgcggtaacgatgagatataagttgctttaccaaccacggctatagttcagaattctcacccttgaggtgataggggccaactcactctaaaccttgtcagtcctagaaaaatataaatagtcaaaccccgaggcgcttctcttactctgccatgtttttctttgaatttctttgccaactcaactaaaatatgttctccgaaaagaatatcccgaaagcactctaagagcgtctcgcacgtgctatatcacgtggctttacacgtgaatatctgagattttgtaaggatcgcatggtttctattggataattgtcaaagtgcaaggttgaatacatggattttacatggtattataccatatagatcacatgacttcgagtactcggcataaccatggatatattacgtttagtcatcattaccgctcagattgttgaaatagccgtcttaccgcccctatacctgtaccaggaaagacgagagagaaacgacgagagagaagagtgaagggagaaaagacgagacactagggacgtgtggagcacttaagtcgttgttctgtctttctttctcttttcctcctttctgtctttagatctttatacgattttctatcttctcttcctttcttctttcacttaaactatctctaaggttatgtttgaaacttcaaggaacaaaacaaaataaatataggtcttctacggcgatgaatctgagtaaagccataaatgcactctgcgctaccagggataagatttaacatccgcagtttcatcaactgatgtatgaggacgataggaataattgaatcttgtacgttcttctattgttgttgaatgcttcttaggttgaatagatattgtactagatagttctttagacctatttgattcaagggataggctgttcagttactaggataatacttttatgccctttcgtatagagaggaagatgaagccgtttgaagtgttattatagcctagagaaagaggattaggtagcctgataaaggagttgcggaaggactaggatatataggtaggtatattgtgctatttcttatgctgtactgcttattggctgacctggtcaaaggtttcgtttattattattacgagaatgtaagtaacgcggattgtccggtatatatggttacaacggactctagaacgttatagtctattagactagacaatgactctatggtatacttgttcaattagtcttacttgattgaagagttataatccaataccttctagtcggtcactgtaatgctagattctcgactggatccagaaaatgcattcagtttaattggtttctgtcttaaaagaagcaattatcgccctatcgatacaaccgaaagaaccattaacgcaatctgatcgaggtaaaggatctgccgagcccctcgtcgacctcgtaaccttgaaagagtttgtaaccaggagcaattccgtaaccctcagcacctccgtaactttcggcctaacctccagatggacgtcctaacagaaggtcggagcgaaatatgatgcgcatcgtatctcatatattgagatattggtgtgactttctaatagttgcgcactttcgaagtcaagaagagttactacacgactatctctgtcatagagaatattgtgctgtccaggatcatcaagtcggaagcccacttgtcgcaaagcatggataccattaaggcagtcggactgaatgtaagcccgttcaccctcggataggtcatgccagagtcggtcaagccgcattccggctctctgctctagaacaagaacatagcctgatggaaatatagttgagcaaacaatttcccccctggagatccacttggcgaagttgcgacgtccggccggctgctgggcccaaatgcggttgtaaacttccgcctccgcttcaaacctaaacgtaacaagttagtaattccaatagcaagctattgaagtaatctgactcacagctcatcgtattgaggtccccagcacttaagtatcaccgttgatccacccatagttgctagccaggtcgccttgttttgaactgttggttctgataatagctgaaggcagttaacgaccctaggggtaggtccgccagcgttaataatcacactattcgatgtgatagtctcttcttggttcgccatcgacggggagtagtaagctgaaatatcaagtagacggccggagacccgggaaggaggagggcctcgtagcttctcagtatattagcagcttttctatatcctagacagttgcccaaatcaatacttacgtttcttggcttaaatgtctcgctttcaacgtactttggccccgacacggccattaaacagaaaccagcaagtaactggcgaagggaaggctgtgtaacgccacgccaaataggcgacgaaaggagaaaagaagagtcggcttctcgtttaacaaaaacggtggagttgtaggtggacagaaatccaaaccgagttgaacatgtacgcatctgagcaacaagttgtcctaagcaaagggccaagagtcagcgaacttgacgtgaaagtgagagaatgctaggcaggcatacctatcagtggctcgaggcgaaatgattcgggccggttgatatgaagatcttcgtccgagatggtccagggcgttttcatttctccaaccagatgaacgttaccaggtctaaggctggtcgcaaccagccccaaacatacgtctggggtagtcatttgtggggtggagattgcctgaaaatcagcaaatcgggttgacgccatacctggcaccaattcgagggctttgataactgggtcgcagacattgcggacaaacctcccggttaaaccaagctcattaccgactgtgtaaagttccgtctcatcgttcagtggaacttcatgggctatgccagcttgtaggaacactcggcaagcgtccgtttggaatgtactccatagagacatataggcgactgacagacggtcggaatggattgatgggttcaatgttcctccgttctggcttacagctggagtagctctagccaactgcgtctgggctggttccatgttttgggagatggaataatcgttggaatgacaaaaaaggttctgggaccctgagccgaggggcttactgttatcgacagaagtgggaaaattgaaagacgatcctcagagaggacgcaaaagacaaggcgagaagaattcacgaacctcagaggacgcaacaaatgacgcgaggtgggataaggagatgttcgtagaagacgaaggcggggcaaattcacgatgctcagcgaggacgtgaaagaaaaggcgaaaagaattcacgtagggctgaaatatccagtttcttcacagctgtggtccactagaatcaactacgggaagacttggtgaatagatgatgagttcaagctgagtgggatgtagaaaagacttggcagagtgtataagacttcggtcgacgggggcctcacttctgcaggaagtgcagggtccacccgtggacccgtggacccgtggacccgtggacgggtggtgagattacgtaatcatacttcgggcccgcgcactttctcggttcggtattttcagcagggcttatagcacttgagggttctaacatttgaaggttctcctccagtcatcagtgatcttccccggggtcggatctttccatccttcgggaggcatctctactcctaggcaatcacactaccattaccaatttttcacgtcctgatcttcggtttcctgaaataccaatttcatattggaacgaccgtggtcgttctgttttcttgtctgttgtttgacaacttcaggggacacccagtcagcttcttccggtcggaacatctaaagttgaaacccccgattgggaactatatccagcatatctttcatcaattacagagcttatacctattttcactaggatattgttaattgagggttctagtctaggtaaaggtaggggaccctcacccgtaagctttgtcctggtccggcggggcagtgaccgtcactccagatcccccttcagtgacaacaacaatagcagtggctgtttccaaattgaaggcatcttctatgtgagccgcaggaatcaccaggggtaccggaatatcatggttcgaatccaagcggtagaacattgggaatagtatccctgcaacggcaacagccgcggctgctagcacgcccacttggcgcttttcaaggctgcgagttataagtaccctatccgagtcttcgaggacgtctataacggcttggtaacacgccgagtcaagttctgcacacttactgtccatcacggaattgacgctgtcctccaggtctggagacagaaacagcatgatcccgttttcggctgggtcgcccactgcagtggcatcgagcacatctcctgagagagtaggagttgggacctaaaacgtgttagacagtttccctgctttaaaccgggataaattgcaagggggacaaactccattggtagtatattgggcgagatcgccaacgaagaagtaatcatcggcaccattgcaataagagagtcaagagaataagagcacgagagacgaagcgggcggcattacttccaatggacggtacaatgagtgtggctattacttgaattgatgagacattacgcattatatagccatgcctttcaagaaactctgtgtatacctctcatccctccaatttactttaaataagggtttcgtacaaaaacgtacaatcctccgacggattaatgactagactacgctttgacacaacccacaaatgggtccaaacgttagacccaggacccatcttggacccattttcaacccaactttttgcataaaattcctaattaggaaggaaacttgtcttttcaggactctttatgatttgtttatgattttgtacaaaaagttgggttgaaaaatagaaaaataacccattttgtcggtcgaaaattgagttttgtcaaagactattaatgactagaatactagcgttggatatcgtacaatcgtataatgggagaacccttcggcccccaagctagcagtaagggactgccttcgtaaatggggctccatactagttctctactagtacagcaagtgactcagaaggcggtggggggcactggaaggcacaaatatctccatctatcatttgacccggatatccagcaacctgctacaatgaagcctaacgcctttcagcgagaatttcacgatacgtgctccgatggcgacatgccaaaaatccataagactcctccatatcgcgtagctcttgttccttggctactagcttatcgaaaaaaatatcttcaagtaccttgagtttctttttccaagctctttcttcatccctatgtaaatcctatatcgacttctctagccttcgtttattctgctcagctttccttatctacttttccaaatccgccttaagctcctatatctcgatggtataggctgtattcttctaggtaatttcggtctcgattacctgtttgagcttatttaacttgagcttataagcctagcgagctttgtatagatccctagcgattataatacctgctttcgtctcgctaattactttcctctggttaataattttgcgctgtagttctaatacctctagaacatacttttcagattgaagtataagatatattacgatacggcgtattgtcaggaccccagtactaagaaggctgatgcctgaagtatgacacctgtcacggtacgtggaagcacgcgtcccgggtgcgtgggggactgtggactggacaggagcaatgtatgctgcctgcacagcctctatgggtcatatgacccataacctatatattatcctcgtatgctgcttctttagggaagtagctattagtttctaagatactactatatatactaccatctctatttcctaatcctccattatatatagcattcccttaggtattctatacctaggggtcttatagttctaatagctctcaacttttatggacctctattgataaatttttggaaatgaagcttgacgagacataagaaccctcgatatatagggacagaggtcaccaattggtagaaggttttgtacagctgggatgaaagaagtaggtacaatgtcaattcggaattttattcatggagaaggaaggcttaggcctaaggactagctattatatatccctctcccccgtttgtcctcctttaataattcagttaagttagcgcgaaaagtcgcgcggtattatataccactaaggcggtgccgaagtattaaacgcggtgcattaaaagtgcgagcggcaagagagatactggtaaattcttgattctccaaagcctggatagctaatgagatcctatcctcttgctctattgaatctgtagataattgggagcgtattggtggcatggtgggtggttgaactaactaagtcctaattcatggaagcgttttgggtagggtggccactcgcttgtgaattatattaatagttgtattaggtgataatgaatcccgaattcttaaaaggctagtttgaacttgcatttatcgtgataagctatttctgaaccagtggattatcatataaaccaccatcaactcgaatgaaaatccaggaagataacttaagagaaagaggcttgatctatcacacgtacatctccccagtagaccattcgtatatgatttaagtggaactgggtacccagacttggtagtcaaacggtaaaagcatcctagttcatgtcagccctgaataggcaatcgcgtaggcaacgtactcgcaaatctgtcggaacttgacgcgaatgttttgccgctccgagaaagtgcaattccagaaccgggtgaattccaagggctcgccaggcaccttctcccatatcacatatgtgacaaatccgcccgatatgatatctcccttatcctgcttcccaaactgatatccaagaagctcgggaacaactttacagcctcgctgcttgaagtgcttcagggcttggagctctgggggctcgaagggcccgatagcctgggcagctcggactgaagccttttgcaattctgttccaagccagggtatctgctggtagatacgcaagaacccgaggggcccttgcgcaccggaggggcgacacaaaacctttccagcaacgtatgcaggacccctaccatcaatgaaattttgctcggactgggtcacgatattcccttcaatcttttcgactatctcccagatcttaggcatgaagttaattaggggttggggcggagtgttcatcgtaatttgtgtaccttcgaggccagagaggacttaaccagagttggaagagttagacatgataggttagggattaatgatgttgcaaatgatgcgattggagtgactgatagaaagagacttgagaaagttgcccaggtaagagcttgtcaaccatgggtaatatacaaaccttggacgtaaaacatgcaaacaacccaacattccctaacctcggaaccacctttcattaaatcacctcttcatttatcgacgtatggctttgttctggatctatctcgttccctgagcccgtcagagcatgatcctatgcataaaatcaaaactctcagatacgaggctgtgactttggttcgcaacgcaacgtcagttcttatttaattcacagaacaaacattatatagccagtacattagcctcggggagctgtatctgtgtggtataataggatatcttcaatgtcaacgacaaagtcctttcggagaggtagaggtagaatgaagaaaatttatcattgggtaagctaaatgacatttggggtgtaacaaccttcgaaacagtagcggtttgaataatagtaccttcacgatttaaatctactccgcgaagtcagtttctgaacctatatatcagaagaccttttccgtttcctagattgccactctgcttcccgctgaatcctctcaaacttcatagtttgcgttcgtaattcatgcaagtcatcgtatccctcatctagttcctcgtagaaactgaggtatttctcaaacttgacatcgatgtcgcttgtttcatgatcttccatgttgaaacgcaaatttcgcgcgaattcttgaaagtcttggtcgatgggtctatagtcaattggctgtttcccaagaagggcatttttgaaccaaaactcttctacttggacgatctcagcactgcaccgtttgcaaatatttagcccaatttccacttcaccggcgcaaagatcacagcagtcgatcccctggtctttgcattccttcgcaatagtccgccagtattgaacctcccgagtgacaattttgtaaatgttgaaaattcgcctggcaatggatggataaatgtatccaggttcctgccaagggtaatgattgcgtaaaaagagatacgcgctcatcccgggccgtaacgaaccttggcgaacgggaggttcgcaacccagagataggatccaatctacaaattgaaatccttctgagaaaataccataagaattgttgatattccacctttttccagctttatcctttcctaggccgcggatgttcgggaccctatgaatccgcgaggtgtgatagacatcatggttctcaaacgtgtttttgattgccatacctaaagtctctggcgttggtaaatcgggtggtccatcaataagaaagacgcataccgagctcatctggcgtccagcatcgtgtttatggccgtgggcatagaccagaacacacccgtccgtggaaacatcgagattaccgaagttaaaaggctccagtgaggaatttgacaaatgtatctggtcaaaggaactcgatgtatgcaaaaatggttcttggggttcgagttcccctttcttgaacaggttgtaaatgtaatggacgatatccctagggattgcattgctagccaccaaccgaatctgaaatcccccgccacctattctcagacaaattcgtcggatggcagcgaagaggatatgtctcgtatttcccgcatgaaatttagcgatgatattcttcagcacttcgatttcacattcgtttctcaccaaaggcggcagacaagttactcgccgggggctgtacacggaggctgtaacaagatgctcaaatgcatcttcagcaacggcgatcacggtcaactcccgaactttcacccagtttggtagtaggaatgaagcatatgtcactgaagcatagaatttggtttgatcgagatgatgtgatcgtggcatcctggaacgtccagtccactcctcctccatcatacccaggcaggcccaacttatcgatagaggagtctcttgtaactttgtgatgatttgtctggcgaggattttcctagcgtgatcttgggttgattgtagcatcgtcgtcacattgtctcttgtcactaaaaagcaacgatattgactctcgacaaaggtggcatgtcgaatgatccccagctggttgtccattgcttcgaaacttttaagaccccgatgatagctgtcttggatgcttctatcgttttcatccgacatgttaggatgtattgctgtgaatgtggaaaatatgtcggtatctggatgaatcatgcttgcacaatcattctccccggatgctatgatccttagtttgtttaatatgtcctcgcgatatatgtcacgagcccactcaaagacataatcgacaatcagtaggagttgcaatgccccatttctcgatgtaatagagcctccccatagatcgaagatttgctgggagaaagttagcatgtgccatttttacaggaaacgtctcttggaacaagacccgcaggttaaacaaacatattcagtagtaccgatggtcccaggtttctcgcctgcatcattatatacgcatgccacagacactcgccaatcctctcctctattcattagtaaccagactaatggatcagcctgctgcttcgcgtgcggctcagtcatattcttcaacaactcctgcgtgcataacagagtccgcaccggaaacgcggattgcaacttaatggaattccaatcgctatctgccgacttcgccgacttcgcttcgagaagaagaaacgggaacaccactggatctccatcctcactgagcggcggatctcccaggatctcatgaacaagcatatcgtgatcatcctccgctctatgtatacacgctgtatcgttcaagaggttttcaatgtttcgagtctgccgaagtccgtagattgcatccggttttgttgcacttggtagttctttctggatagttgagtcgtggtgtactggttcatcttcccgatggccaaaaatccgattcaacccgacagcttccattctgcgtggcttgttagtgccagtgactagcgggtgatgtgttcctaatctgtaactcacgaatcctcaagtctgaagtctcgcggacaccgacagggctctcgtttattctgcctaacacgcagggcttctgtcatagtcgagttcccctcacttgtcgcttcgatttctgaacgccatactcgctttcgacagaacttgctgggttccaatataagccatcttgttaatatcgttggaattagaattcctaccatacgacctctgaagtaagtcgagctaatgcgtagggttcgcacgcaaaccgccaggtcgattcatttcgactcacacagcgcttagcccgctcagagagttcatcggcatgtttctttatttctgcagtccatggtgcattttcaatggctgtcgcacaagccgcataggtgtcgaattgcctctttcctagctcatcaaccgcattaaaagtcggacgatggctatcgggccattcagagcttggaacctctccgcggaattcaattctatacttccgtttgagtctttcgacctgcttccgttctttggatgtgaatggcatgggtaaagtgtaggcctgagacttgaaaagtgaaagagtatagctatgggcatcccgacagttgtctagatataaatactaatatatagtccaacactgacgtatgtggaaactcgcaggcgaaacttcatcttcgcggcccccaatcctagtttcaaggaggtaatgaactaatattactgttgtagctgccctacagcgtagggagagtcgggatcagcgggcagctccgggccgttcatctaggtagcgatcgccatggggtcaaactgctggatttgagtttcggggaaattaatctagttcattctctgcccaaagctctaagtaaagatctagccagaagaaattacgtgctagataagctagagtagactgagtactcctttggaatcatggaaggctctttttctccaccagtcctctatgctcttagaaagcttcttcaaaatgtcccacactttcagtcttcttaagactccactcactttggtatccatatcacgcgacaatgctgactacgttctatagtttgtacagtgccgccgccaagtgcgacggggcccaaaaatatttcaagtactatgcgtgaactagacccggggctgtactgaccaacccatgtaaccctcagatcggttgagctagacttattgtactgggtgatcagcaactggttctttgtgcgccgtggcttaggtctgttcctgtgaagcgagtagaaaatcaatagccaaatcctcatctcgccatcccctttaagccagaaggtagtgtgccctcaactgtattccagtggcgcaagattatgcgctggtcttagcttgaaataacccgccaatgaggtctacatttgaccactgatgggactggaaagttcgccagtcggcctttctcaatcaaggatactaacgcaccttgtagtgctacccataaggaaattgaaaacgaatcaacaaatatgagctgctacccacaatatctaaaacttcattttcgtaggttgttagagaggaatggcccgggcaacaaccaaagtatgatgaaacaccagcgcagaaggtgaaactaccccaacattagtgtggttacatcgcatattagttccgtttcccgaaataccaaattcctctgattaacggatatatatagctttctaacctgtctaaataacagggtaaatattacacaaattatgcgtactggcgatatccactgatgtcttcattaatctttgaaaagtctctccaatgtcgacctcatggtttatgcgggtcccaaccacctatagggtctttttgcagtcagaatctcacgctcgggaagaaagactggcttcttcgtccgaaggcttcctcttcaatcccatggcgaggtgaaattgagacggaaatcaatttagcttatacttcacaatctacacttatgccgatatctttgtcagggttgtgagaaaagatatccttacaaagaatagagataattttgtgatatgtatcaaattcatagagaatggattagtagatgccttcattgattttttcttctggtaccggaatttccagtatcaacggcggagggatatatgaaagactaaaagcctagtcattagtacgagttttgtgccaacgcatacttgcattcttcggcgcatgcgtgtgacgaagcaataagagccgtcatataccatggtgattaggtacccatatatcaaagcacgacggcagatggagcggggttttgtttgatgggagctagataccaccttccttggactatgcgagagttctaattcggactccaaagaatcgctggattcaataaaatacttagacaacgagaacccgctgacaaagtacagctttatcttgtgaggattttggcctctgttcagcggaccatggccgaagactggctcattggttcccgaaaatgcaagaatcattctacgtggtatttcgagattggtcagacaggtgtacaggtggcagcaatcaagtaagctttactatcggaggcaccatgatggcaagcctctcgaacgttgtttgctttttttcggtggtctatatctactctctatcccccccttccatttttctcttcttgcccaccctcatagcgaaccttttcttgccgtcataatttgtgaaaatactggatttctgacgataaaagccagctatcgcactcttcaaactacccctaccagcttctatccgatcttttgactttaacacgcatccttcatcaaggtcaaaagaatatcttgatcgtttcattcttccagctgctctacatgccacataagatggttccagctaaaaataagaagcccatagccaaatggtctatgtatccagctcttcacgacgaggtatcaacattgttggtcgaggaaaatcttcatttcaaattccatgaggatgacaatgacgcaaggcgcatcagagatcatgatacaaacataatgggtcgctttgtatgccataacccaggatgcaaatccaaaggatggtcaagcaaaatgatcgccgtcacaattcgtctatacccagggcaagaatataatgcgagggtataccaccaacactgtaaaacatgcagttgggtcagtcgaccagtgctggaccagtcatacgccgagagaattgtctaccggatcaaaaaatggaacggagtgccagtagagacgatttcgaattccggcagcagcagaggtcctcacaacagaaaactttgtgaggggtgcaaagccggacactgttcccaatcaagggagaatgcaggggtggattttattgcacaactagaaaggtttgtcagtctcaaatcgactaacactatttgatactcgtactgacatatgcttagattgactctctaacggaccagagatccaagtgggatatagaaaatcataatcacggagaacaacctttcatatatctgatccacctttgagaaattagggcaaggtgtcaaatggaatactatgggacaaagtcaccttcagtgcttattctctgttatgaaaaccttcaataggcctataaatcccagcaccactttgcaatatcttgctatttttgtagacccatatatatattcctgcaaggctttcaaagagcaaggtgtccttcgcaatgagcgaaaaacaggatcgacgggtttggcacgaaccacgatcttgaggactaggacccataattcgagccataaagtaaccaattactagggttcttgcgtggctgtgtgcagatgccaagatgccggccgtttcagctgagtatcgtggcccaattatgttgtactcttgctcggctgtcagttagtacatactgtattgtatgtagttcgggatgggtgactgcgaaggtgtatagcggccagtggccgaatgcctaatgttgcagagctgatgccttaaatgcctgatttatgccgcctataactactgtgttttgtaaacggaaggcactattgtcttaggggctaatcctgataaggcagtgtacctcttggcactctatttccagtatgcatggcgttaattatagtctcgctacctcttatagcagtggtatcggcccctcccgtagtagtcgaatcgcgagcttattcttaggaaacttcgctacgctagagctaggccgggggaagatagtggataaggttagaggaagagtaagaatactcgaattggagggagatggaggtttgtatagtaagaacaactttaagatcaggaaataaataaataaacaaatatatacggtcggaatatcttcaaactaccaagacttaggcgaacagagacttacatagtaggaatagctttattttagatgctctctgtcgttgtaatccaggtatttgccagtataaaatcaggcaaaatcaggcattcgaccgctggccgctatacaccttcgcagctcctcgtgtaacgaaccaaattacatggccatcccatacagcatgccatcattgccacttttcactcagtcttttcacgtctttgaccgttcggaaccttctcattactctgccaggtgaccaccagcgaatccatcctcactgatgtatgtttttgtctttttttttgatttgttaggaaatcccctcttgccgccctggtacatttggattgcccctaactactttaggtagcttgtggattagttctgccgaagttctgatacgctaaagaacaacgcgtgtcggtagcatttctcttctctatactagatatatgtagccctatagattataaggcgctttttctataggaataagagcggagggaagttagcggaagaggaagggagataggaaatttcactttggttcttccgccattccacaatgtattatcgcgacatctttcaatcattgtcacgccttcaccttcaaattttcggtttcttcactcatctctgatcagctttttctctttctttttgcactcttgtcatcaaatcttcacaccaacatgtctatcatgggatattcagataattgcctaggcacacaagtgaccttcaccactccctcgcctcagcagtgggttctcgaggagaaactcaccgaggatttctaaagcattaccaaccgtgaatttgagctgggtggtggaccttccttcgctgtgtcaaagtacctctgctacagtgcgacagatagtagcaagaaggcattcatgagaatttactttcagattcctaaccccggaatagagtcccagctcccccagcttcgatgataataggcagctccaccccgtcagcatttggagctaaaagctcgaaggatctcagtgaataacactgtactatggtcccagctctcctcgcccacaaagaaggaaagcaaggcaaggacggcgtggctctagacggctatataacacatattgtatgggaaatggtccgtaggaagccacttgatacagatcagttctagaggcctgaatcggcgcatttatacaaggccgttcgcacgaagttccgccgtatctaggagtatgtttacagaatccccattagcgtgttaagagtgaaactgacaaacctaagagagttgaagcatcatggatggcatccatagctccctcttttgcagaatattatatacgagtcaaccggaggtatgtatgtgatatacgatatgcacctattatgaaacagaatatgcttactgtctttaggcacattgcaggtttccgagacccccaccgcttcgatctcgacgaggaattttccgacatgacctttgtcctctggcgttcaactaggccaccaagaaagtccggttgggagaaagaccctaccaagtgggcctgataatcatcatggatgcccgtttccccagctcaaatgtgttgcgccaatgaatcgaatttttgccgcaattacaggaatcgaagttgatatcgaatgacagcgtaagacttccaatttgctaactaattgtccgcattatcgggccgaccacagtagttgctcttttttcttgggcaaggcggaatgctttttgcaaatcatcaaagttcccagtttaggcggccacaatatgatacaagatcatgcctccgcgattggaacttctatggtttccgcttgtgggtcgcgtgtggatatgtcggtgcagatatgtatgttgtatggagttgaaaggaagcgggggaatttctactccgtaggtgacggtcagctaccgaacaatggtacttgtagtatcgggaataattgccaggcaatctccaagagccacaatatccacaatgaactttttcagtagtggcaccaatagtcacatgaactggcgtcaatagtagcaaggtcaacccgatcgataaacctgcaaatactaggctctaacaaatccactggggaaattgagggaagtcggtcttcagtttgttgtctcttagaaaagcctcggcacaccaggcacgtgataaggggtaaattgttgcctggtttgtcaggcgagcaaatccttgcacgtgtttacttctcctattatctatcatgggccctcttagagatttccctcaatctattgggcataccaattagattaatatcgtttttcggcccgaattggtagaattccgatgtcatatggccagtgatcactattattgtcggcttctatcactcttctttcttttcatgctacctatacgtcttttcaaggcgaagaaatatacatttcatcaaaagtataagcaatcacatgcgcaaattaactaatttaactacattccccggaaacccaactgatctatcacgtttgtacacgtgcacactaagccaggtcggccaataaatctcctccgatatataaccacccgttgccgaaagttggtcgatctccgaattttcgctctctattactccgcatatctacactaatcctacaacgctgtgggttaaggtgacaatgcataataacgatctgcagagtgagcgacgtgcagacatgattggccctaattgcattctatcgtatgcaaatatgttatgcttgtggtgtctgcgccgagacacgaaagtatatatagagctaaatcatataatctttgtgatgtagttttgagacttcagattctgggactcatttataacaacattattcggtcatggggggaattctatcgctcaaattgctgccctttgtggctagctgcgcctttgctggtgtcaattatcctgagatcccgaaggacttgactacaccattccagcaacgattgacagtctatggacctaatggtaagaagaccggtagatatagtgggcttggagaggactgacttattcatctttagctgtgtcggttggttggaacacctatgaacagctgaatcaaagttgtgtgaattatggcttgtcagaaaccaacctgaataccaaagcttgctcatcctcgtcgactacctacgatccttcccggacgtggtcaaatgttgcagtcctaacaggcctgacccccgcgacaacctactactacaagattgactccaccaactcgaccataggccattttctcagccctcgcacgcccggcgatagaactgcattcaccatggacgtgatcattgatcttggtgtctacggcaaagacggcttcacaagcaaaagaagcacaaaaaaggacactattccagtcatcgagccagaattgaaccacaccacaattggtcgcctcgcggaaacaatagacgactacgagcttgtcatccacccaggcgatttcgcttacgccgacgactggtatcttaaattcgcaaacctgctcgacggcaaagaagcctacgagtctattatcgaacaattctacgaccaactagcaccgatcgcaggccgcaagctctacatggccagcccgggaaaccacgaagcagactgctcagagattccatacttgaacggcctctgcccaaaaggccagaacaacttcaccgagttcatgcaccggtacgagaaaaccatgccgcagtcttttatttcgtcgtcaccaaacccaacggcccaaaccctggcccgaacggcccgcagcctttccaacccacccttttggtattccttcgaatacggcatggcccacgttgtgatgatcgacaccgaaacggatttcccaaatgcaccaagcggccaaggtggctccgccaagctgaacggcgggccatttggcactgcgaaccaacagatcgagttcctcaaggccgatctcgcttccgtcgaccggtctgtcacaccttggctaatcgtcgccggacacaggccatggtactcaaccggaggatcgtcgaacgtctgcagtccctgccaagaggcgtttgagggcctgctttaccagtacggcgttgacatcggtatttttgggcatgtgcacaactcgcagcggttcatgcctgtggtcaatggtaccgccgatcccaacggtatggaggaccccaaggcccccatgtatatcgttgctggaggccccggtaatgttgagggtctgagctctgttggcagtaagcctgcttatacggagtttgcatatgcggatgactatagctacagtacgcttaggtttttggatgagcaacacttgcaagttgattttgtgaggtcctctactggagagatcttggattctagtactttgtacaaggaacatgcaacggattttgtggaccagtaatggaagtttggggataatagaggctatttagttatgacatagggcgtgggacgatgtgatagtgaaatagaatgtgaatttctgtttacagggctttttagcacaagaaagtgtgaagacctagtaatgtagggaagaaaaagagtgtcattctataagaaaattactatataaagaaagaaataaagaaagagagccccaatatttccaatgccatctaatatgcacaatcatccatcccatcaattatttacatacgccttgcctcatatgaccatatatgcatcaaggatctaatgtaaccaattataaaagtacagcccatgtcgtatatgtggctctcatcgatgcgatagctgactattccactccttcgggggcgtcgtcgaacaacccgccccagatggcccctggaagccccacggctcactatgcacgacagtctcggagacaactgtgatatccttggaggaaggctcagatggagcgaggatatgctcatcgctgccccacgcggaggtctgcatatgcgttggcgcggcagcgttcgttttactctttttggtgtcgccttcgccgcgggttgtcaagctctttaaacctcgactggagagctggtatggctgtcccgacgttttacccgaggaactgaagacgtgggagagaccaatcttcctgaagcccttgcggataagtggttgaatgatgggcaggttagagacaacgattgagacgaaagtttcacgacaggcccatttggagccggtttcagcgccgtcggggctggactatagtgcatatgtcagatatatgcgtaaatcacaggtgtgtgtgtttctgcgtgggaatcctattattgcatgggacgtaccttcataattgtaaccgcccgaataattcccgctatcatgacgaatgtagcgccggaaaagagagccataagagggatctttcgtttcagattgatgttgacagtccaaagaagaggcagggggattgagagaaggtagatgtccgtggtaatgttgagtatcacgatgacgaaaacataaacgggggagttggctggctgacagaattctgtaaatatatcaaggtaagaagactatggattatatctgattgtggtgtaactcactgccggggtcggggtagatctgccaaaatgcatggaagggctgacatgacagtaggatcgacaacgctgctgcgaggtatgtcacaattagaaggacataccccagtcgaactctggtaggaagatgttggagaccagtcctgtgatatgcttagcgcattggttcgttatatccaaggtggtatgtgaagcgcacgtcaatcgagagtagaagactgccaagctgaatttaaccagccagagaatagccgtgtaaaatgaccatccaacaatttgggtcttggagccagcaacacggtgagcccattcagtcgaattggggtcaagagctgctcgagcttcagacgtcatgtaactgttagtaaggccctggtatttggcaccgacgaggtatgctgctactgtttcaagtacgaacaggatctgtcaaaaagcattatgttaattataacttctttcaatggtgtttacaggacaggtgaagcaacttactcccgccaatggcatgagataatcatcaagttggaaatcggccggtccgacgagcttccatcgtaccccgacacggactaatattatgatcaaagccaaggacaacaaagtccatgcttcgacgttaccggccattcttgcgagtcgtcagttgtcagcaaaccaaaggacaaaataacggaagatgaaagcgggagttggagagaattataaagaaaggccccagccagaccgacccgcttagaatctccagaatatacggagtcgggatttacactataaacttgtgcgactagcttgccaggctaatcgcatagtgcgaatagcctacccctggaggatcatccatgtaaattgtgtaattttgtaaatttgtgtcgtcccaccggctccataaaatccaccccgctaagaggggtagatctgtaattggtgcgtggccgacggtccgtgagtccgacacgggcgggaggctgatacgaggggattacgaaattgaggattacgcaccagggatgcgtagaaaattacaaggctatgcaagccggcaaactgacacttgcctgtgatataaattaataagattcggacgtagaagccgaaaggggaagttgaactcaaaaagtataccccagccctgccttgaggtcccgtatggagccgatcaaactcaaatcttggtggggcggtggggctccgtaaggtcgagccataatgtcccgacccacggctcagccttcggaaagatttcggaacccgttacacgcgctgtggggatatccgtggtgacgagccaactaccaagggtatcattggccaattcatgaaacagcttgtccaggtgatatagggcttcaagaattccttaaataaccacattgggaataggcccccctctccccctattgtcctccgctgttctccgaaatcacgtatttattcttcgtttcctcccaataattgaacacaaatttccaaatttccaaattttggtacttacgttttggtgatttccacggttcactcccagttgatatccacatcgtttcacaaagtgcaatatgtccacctttgactttatcatcgtcgggagtgagtgatcttcattatgccctaacttcgttagcccttatccctaatccgtcttgcaggtggtccgtccggctgcgccctcgccgccggcctcgctaattccaccgcaagaccccgtgtcctcctcatcgaagcaggtgacaacaaagatgatcgcaaccttcgcgtcgacggccagcgatggctgaccttccaggaccagtcaatgaactggggattcaagactgctccgcaggcggactgcaacaaccgtgagatcgactatagtcgcggcctgtgcatgggcgggtcaagctccatcaatttcggcgtgtacactatcggcgcacgcgatgattaccaggagtgggcgagaattgttggcgatgacgcttttgcgtggacaggtgtgcagcaaaagttcaaggatctggagacattccatggtgagattccggagggcatagatagaaaatacgtggctccgaagacggagaatcatggaggcgagggcccgttgcatgtgggctttgcgcgggagtgggaacgggatttaacagacctcttggatgtcttcgagcaggctggatttccattgaacccagatcataattccggaaatccgattgggatgtcggtgctgattagctcggcgcataagggcttgcgctcgacagcgggggatctggtcaaggagagactggataatttgacaattgttactggagcccctgtgcagcgtgtcctcctcgaggggaaaaaggctgtgggcgttgaatcaaacggaaataaatgtgaaaacctaccttcgctgcgagtgacccagatattaataattatgaacagatttcgccacaaaggaagtcattctatccgccggctcgctgaacgaccctcgtatcctgatgcactcaggcataggccccgccgcccaactccagcaatacaaaatccccgtcgtccacgatgcacccgctattggtcaggggcttcgcgaccattgcttcgtcccgatggtaaacactcgtacagaaaccagcacagaccgaaaggccttttatggcgatgaagccgcaatggaagtcgcacagaagcaatgggaagaagacggaacaggaccttgggcgaaatttgcctgcgagttgggcattggctggttcaagttgaccgagcagctcacttcctcgccggaattcaaggccctccctgcagacgaacaaaagtatcttctacaggagaccgtgccgcactacgaggtcctcacccattttcccgttcattgggtcatcccagatttcccggatgaggcgttgaattactcctgtctacttgtcttcttgttcaatgcgcagactcgcggagaagtcacattgcagtcgtcagatcccgactctccgctctctttcaaccccaagttcctggcccacccattcgatcgccgactcgcgatcgaggccttgcgcgactcattccgtgtcgccaagcacgaatcctataccaaggacaacgtggctgagctggcaatgcccaagggtgagtcagacgaggatttgctcgagtactggcggcagaatatttcgtcgagctggcacatgacaggaacagtgaagatgggcatgaaggatgacgtgaacgcggtcgtggatccggatttcaaggtgataggtattgagaatttgcgtgtcgcggatatgtcggttgtgccggtgttggtaaatgcgcatgtgcaggccgttgcgtatgtcactggtgcaatttgtgcagagaagttggcgagggagtataacctttatttggatcaaaagcacctagcagtgtgagtaggctctaacgcaatgcaaattgcgtattctagttatgtggtgttcttatataaacggtacatataattgacattgtttttcctcgatcctcagaatagttagggaatagttacatagaaatacacgtataatatgactaattgttatcaggggatcacgtagcatgttgatcaactccgttcgatgtcattgaaggaactattttccttcaataatctatgctacccacttttacggcaatacgaaggtacatatattataaatagtagtattttgagtttaatgtagatttctgtgccgttaaacttaaagataagtataattataaccctattgttgtaatatatagtggggcgccttaaatacataccagatcataccgtgggagatacatagcagaagatcgatcagataagtttgcgacatagcttttgtttggatcgttctctctgtcatttcttctcttcttcttccttttttctctggctttaatctttgagtcaaatggactctttccatcgatattagatctgccttgtgacagtacctaggtattgtatgtcgtggccccgatgatcattaccaatcctgtaaggaggaagtctaggcatttgcctatcatgcccgtaaaatcgaaggatcgtcggagagcagacgctttaaaacccaaggaggtttgaaactcgtaagacgtagtgcatttagagtggtataatatgccatttttgcattataaccctgcacaattatacatagaaagatctgccctatggtttactactctagctacgaaacctgaaaggggaaagcttatctggaaaaagacatcaaaaatactactaaaaagacatcacgaggccgcataagcgaccgactattgtaatccgacatcaatccacctggttcaaaattatcgagcatcttgactttcttgatattgtggttcccatcgaggcgcttcaatctatgtgtcaaaattgatccgtgcacgaatatcataaaattcatggaaatgatccacatccttgagtcttcgtccctcttcgcatcttgactattcttctcctctcaaacccccaaggcatgaggcattggaaagaaattattatgagatgtcaatatgggaggacataaccagtaggccctaagccgcaacatcaaattattatattacaaccttcgaaccttttcattgtatatctcgcgttagtcctatagtatttcattaactttggttttgcctgttgatcaggaaagaactacgtagcaattgataatctatattggtgccctccctttttatccaggaataagaattttcatgaaagttaaatttctttctttcgattctaaaccatcaatgactatccaaaaccaatctcaagtcgaaagtatgatacagtacatcatgccaagactgaaacctataccggggcggacgctgactccttagtctccttctcccgtccccgaattttgcgtcgctcgacgatcacagcaccaataattttaatgcaacacaaagccaatggcaacagccacatatccaccattgccttattgaaagcgtctaggacggcgatcttgtctgccccgtgtaacccgttggtcagagtcatgacacctccggtcatgatttgactagtgtcgatactggggatatctgttttggcaatgttttggtctaggtggttgatgaagagggattgagcaacgccagtaaagattgcactatcaataacatggcagtaatttatggctttatcattttccccttccggtaggatagattctagcaacacaataccccgacccaataagaatatccaccaaatcaagcacattctgggcgaccataaccggcgtttgagcacatacacccatgccaaggccgaagagaatttggtacccaatccattttcccgtgccgatgtcgatcgtgaatgtggtgaacagacctgccccgagggaaataaatttcgaaccaaaaatgaggaatggccaaatgcggtccgattagaataccaccaagcagcgaggatagggcattggcaatgcccagaggaagggtgtccacaccagcgccgaagggactcgtccctggagctccttggaaccaactgtagattcattagcgagtcggctctgtcgcgtcatgcaagacatggaatgtaatggaataagacatacattggaatgtaatagagcagcaagaacgaggcaccatccattcgaatatatcggtacttatagagttagtagagaattttcattgccaggaaggtgccgcttactgggaacccaaatctcatctctttacgcagattgtgtgtgctccgtggcatcaaacctggctgtcgcgaatgtgtacttatacattgtacgcttggtaaagaccgtactgggatggtttttgcactcttatttctccttgctggggtgtccgataccgttatcgccagcgagtacggcctcagcacagaaggccttgcagggtgtgttgacagcattgagagctatttgaatcatgctaccgaaaatcgtgatgacgcaaggaaaaagccgaagagatcattgttgccaagtctgtttctccatatttgtgaatttgatcagtcatctgactcgaaatctagagaagagaacatgattgcgagaattaagggcattcgggacgagtatggcacggcagaaaactattttctgcgggaacgcggcctttctgacgaagatctgcgatgctccagatcaattttactagcaggcgacgacttgaacattccaacagctaaagggggaagaagtcaacagtcggcattcacgtgaatgcaggaagcgacattgcgtaggctgctgccgatatggtgttaacgagagcaaataagtagatgtgaactgattcagcagagttacatagaatatgtttctatttgataaaggatctattaaaaatacatgataatgcatgccttcacatatccatccacaataattacaaacctccgaattccgaaaatgtacgaagacacccaaattaattaggaactggcctcaagctcactcagaatctcatcagcggccttctcggcgaccatgtaagtagaaagcgcggtgaaagtaccggggactttggggtaaacggaagcatcaacgacacgaagaccagagacaccgcggacacggaatttggagtccaagacagccatcgcgtcatcatcagcaccaatggggcaagtgcaggatgcatggtgaccccaagtaccatccttgatgtaatcgatgatgtcttccttggattggacatcaggaccagggagaacctcagtgatgttgacggcctggcgcttgaacgcgtcacgggcaagctggacagcttcgtacatagcagtgagatcagcctcgtagtcgccgacaccagtgtcgaagtagttgaaggtgatcttaggcatgtcaagaggatcagcggactgcagaacgacggttccggcagagttgcgggggtgagacttgagaatagcccaggtaaaccagttgtgttcgtcagtcgcattgatactgtagtcggggaagtagccacggaagttaacagggccaccgaattcgaaaatgtcgaagtcatcagtggccgtggagctcttgtatagcatggtggcggcgagaccgggggatgagtaaattccgtggtcgccaagaacaggagactcccaatcactgatgcaagggtccgcctggtcgcgaatgctgaaggtgcacgtgtccaagcaggagaagtcctcctcgacctggccctgaacggagatctcatagtggtcctggaggttggtgccgacaccggggagatccttgatgaccttgataccgaacttctcgagttcctcggcgggtccgataccactcagcttgaggatctggggagagttgtatactccaccggcaacgatgacttcacgagaagcggtggcggaaccgggggtaccagaaacagcggagttcgacagaggactggccctgtagaggtgctcgccatcgaggaactccacaccggtggcacggggtggggtttcggtctcattgaaggtcaccttggtgacgtgggtgttcatgcggacatcaagagggtacttcttagagccatcgtcattcgtagcatcgcgtacagagatgatgaattcacgggcaccattgcggtgagcgtcgtcggtggagatagggatctggtagtaaccgggctcggtgtcacgggtctccgtgtcagcattggcatcgccaactagcagagtgccaaggttcataacttgatcggtcgtgttaccgagcgcaaaggcaccaccggtgagcaagctcagcaactgggtatcctctaagacaatgctgaggggcgcggtttcggtcgacaaccagccgtcgtaaccgtggccctcaactgcgggaagagagtaaccgttgttctccagcttagtgaagtacttgcgcatattgtcgggtgcccaagagctatcgttggtgatagtctgaatgtattcaaagtcagactggtaaggatagactgcaatcaaagcgttgtgggcagtgcaaccaccgagggtacctgtacgagggtagagggttcccttcaaggtcgagccctcgggagggttgaggccagtgtatatcccgccatcgggcgtatcatagctagtcttccaatcgcgagcctgacgctcgtcatcttcgtagtggtggacgaaaaagttccacgaaagcttctcgtcttcggaggctctggcggagtaggcagggatggtgtagttgtaggtttcaccctggtcatcaccagcctcaatgagcagtgtcttgtgaccagccaaagcaagtcgggctgccagaggaccaccaccagcaccggaaccgacaatgacatattcataaccggtgagttccacagccttggccacgccggacgtggcgaccagcaggccaaagatataagcaagaatcatattgacaaagaaggactttgagtgacttgaccttgcagaagagatatcacccagcttttatgcatggggtttcccctgaacaacggggatggttcacgtcgttctccatttttatcaaagccgttgaatacttggcgtgcctcggtctccactagctcatggtgatctacacggagacagctgagcctagtacttttctaggacaattcccgaacgatcatcagtagtttaatgcgtaaaccttacatcgatgcagatcatcaagacggatccacatgtttcgggggtttctcctttccagaacgaagcatcactagcagttcgctattgccgagacagtgcggataatttttctcaaagctgagacattttaatccctgccatctggatgctcaataccatgttaatccatgtcatttggaggctcaatatgttaagtggcaggctttcatcaaaagggggaagtcaattcaagattctatacgaggtagatcagagagaggagcaggcacccaaaatggcaaaagagggaaaaccccacatctgcaaagaatgcaaacatcgagtgataatcctctgccgaggcagatgacaagacatgctctaccgagtccaccttggccaaccccaccaggactaagaaatggccgccaaaagctcgttaggccatgcatgttcgctcgtattattccgaagaagaccggtttgatcaacggagaaagaaagcagagtatctgacataggcttgcgcctgtactccgtactgtgcggaaagagagcgtaggcggtgtggtcatcggaggccttagctacttccggctagatcaatatgactgtcgctccgcaaatgttgaagggtcaattattgcgaaaaaaggatcgactgtcaactgtgggatgtattgaatcgacagtaatgggagtgatcccccggaagatgtgcgtgatatgcacataaaaagatgtccaaagatgcgacaagcatgaccaaacggcgttcggtgcccaggaagaaagggaattgccttccttagccagcgacactgcttacgctggcggtcggtaggatcgctgacactacggagtagacccgcagttatttaatggcaaacttagtggggaaaagaagatcagaacgatgaatatgggtaaaaggagatttatctcgccaaaggcagacctcaggcagttacagaaattcatcatgaactgaaggggtggaagcgtatttagaaacactttcgtcttagttttgaggcaagctttacgtcaatcacctgatcaaataataggtatcaatgacgtagggaaggatgtagtctgctctatctactatgggatgtaggatactgtaagggggaaggagactggagaagaatatgagcttgcgttggcttcaccaaaaggctactagtcaacagcaccacggagaggtccaagctcgtggctgttggatcccctgggagcatactgctgtcccaggagaccccggtcttcccagaagacctagcagaatctgggttggcatctgatcggctgcgtgtcgaggtggtcggcactgcagactcacgtctagcagaatctgggttggcatctgatcggctgcgtgtcgaggtggtcggcactgcagactcacgtctagcagaatctgggttggcatctgatcggctgcgtgtcgaggtggtcggcactgcagactcacgtctagcagaatctgggttggcatctgatcggctgcgtgtcgaggtggtcggcactgcagactcacgtctagcagaatctgggttggcatctgatcggctgcgtgtcgaggtggtcggcactgcagactcacgtctagcagaatctgggttggcatctgatcggctgcgtgtcgaggtggtcggcactgcagactcacgtctagcagaatctgggttggcatctgatcggctgcgtgtcgaggtggtcggcactgcggactcacgtctagcagaatctgggctggcgtctggtcggcaggatggttgtaggaagaagaaaagggagaaaagaagggggggaagagcgccccttatatattggcttgcggcctcaggtagcactcgtggaccaaggatagaaaacggaagatttgagtttcaccttcccaaaacgtactagtagctactttattgaaggttaaatccactgcaactacggagtagtagttagggtttactatcggagctgtacactttagagggttgctctggctctattacttttgtttgggaataaattcactcataatactggaggtctatagctgtaccataatttgaagattcagtcatcaatactagaagaaaagaagaaacaacgttgggtactgagatttgttcataaccaccctgtaatatgtgggtacagtgttgcctcactttccttggagatatactgttctactccccggcttcagtggccatgtcctgcggtccccatccacttggtcaataatcggagtggatcattagttggagttaaatctacttctaggctttgatttatgttttactgcaaacctacttcatgcatttgatggtgttccatattcccatacggagtcggacacacgttgacaagttggcaattcgctcgtacaacatagagtccgagtggcgcaacaccgcaatgattggattcgaccgtgtctgcctcgatattcgagatatatgaggtcacacgtggaagatggacacatcgctcgaagtctagagcaacatcggaaccttggaagctcccctatgggtaaccatccggatgacttgctggtcttggaacgaattattttgctacattgactacgcaggtaaattccccgacggcagatatggaccggtctgctagatttaatttgtaaaagaaatagatagttggaaggcatcgctatcctacttccaaattttctcccccgcaaccaaatcaaagctccgctcgtctggatgctttttcttttctttttaatactggtggtgttaatgagagaaagcaaattattgatatgtcaggatctcaacctaactgtacccccgcgtgcaaacttttttgctctttggttctcagatatcgaggccctttgaaagtgtaaggtaaaaaagcccgtggccgaatccaggcacgggttatcctggggctaatgcctcgggcagaccgtcaagcctaaataaagtaagacatgcccttctccactttccttctctcctccagccagtttcatcaagcattttcaacaacactttcttttcaatatggaacctcttgatgaccagaacattttttccgagttcgaagatgaggagagaaggcagctcatcgaggagctgatacgtcaggaccctagactagcggaactcccgcgtacgaacttttttactctttggttctcggatattgaagtccttcgggtgtttgccaacgtgcttcagaggggtgatcccaatttcaaatggcgaaaatatcttttgtccacccccgacccaagtgatgtacctggagtctgtaagtgcatcatcgtgcatcagaaaatgcctctgtggtaacaagacaataagctaaaaattgatatacaaaacagtcgcatcaagtaagcaggccaataagtcgtcctcgaaaggcaaatcttcctccgggtctagattgcctgtaccagctcaaagccccgcgggcaggactcgctccacgtctcctcgaaagggccagccgggtctccgcgagcgttcgattaacacgccacgtacttcttgggatgaccagcaaaaccccctcggtgaatcgtcaacttccgttcagcaaagcccctcccttggtcaggatttgactttggttcatccagaaagacaaaggcgagacgacgctatgaagaagaagatactctgatcgagaacattgagacaggataatgctaacttccttgccctttagtgcctggagcgagatagtaacaggtgcatcataaccaagcgcgatcaccccgggattcagtgtgcccatatcattccctacaaattgaacggttccagcacccggggtgcaacctgggaatggctcgaaaatttctggggtgaggctcgcgccgacaggtggaaggctgagctcctcggtggctcaaatcaccagatcaataccgaacaggtcaagaacataactactgggataattgcctgtatgctttccgccacttgagaacttacgagcaggacacgaaagtggacattgcgttccattggttgcctcttcgcgggagtgagaagcgaaccgacattatccccactatgtcccatccattccctaatcaaccccaaggatatgccacatctccaggtggcaacagatagttgttgcattgtgaatctttgaaccttatctcccccggacacattttcactgtgacaaccacaaacccagtgactcatccacttccatcggaggagttattgaaaatgcaatggatcctgagtcgcatcgctagtagctggtgaagacgaggacagcgaccttgactccgatgatgattccgtcgcttttacttcccgctcgagatctccgaacccactgagcaattgaagctcagagcaaggagctcgtatactctctgagaacatgcctttcattaaagccactagttagttaccgagtatgttgactaagagctttcctcgttccatcgcccaagttgaaagtatggctagataacgcatttctcacgtcaatatcggtcatccaccaagactgtggtctttagaactactcctgttgaaggagaaaggaaaagtggagtgagagtgagagtgaagtgaaagtgagagagaaacgagagatgtctagttagagcgaaatagcagtccacaaaacacggttgtttatgagcccggtgcattaggtctaccttaataatatgcgaaagatgacagtaaaaaacgtgatggtaagattggaagagctagtatttcaagagaagctacacgaatgagcttgcgttggctttaccggaaaggctactagtcaatagcaccgcatagaggtccaagctcgtggctattggatcttctgcccagggatatgacacatctccaggtggcaacagatatctcttgcattacgaaacgctgacctgaaacttgtatcctccaggcaaactttcaccgtgacaaccacagacccagtgactcgtccacttccaacagaggaatggttggaaatttaggacagcgactttgactcctacgataataccgtagccgttacttctggctcaatatctccaaccaaggaggcactaacatgacttgcttcggggaacgaccgacctttgcaccctctcgatgaaacacaactgaccaaaacatggctaaaccagatgccgatcgtgaggcaatgccacccgctcaaatttcccctggacaattgaacctcgggtctccaataggatccccgagcaagggacccctgctgctctgtccatatcctccttacaactttcaactgcggcgctataggtctaattttgccctccttggcgctatgctaggactccaccgccgcggaatggacgaccaccgtaaactcggtcagatggccgtgaagaagcatgggacgtttgtctcctctccacccgcccgaccgaaactcaaatcggccgtcgtaagaagaccctaaaacccgcgcctctgaagcaccgacgccgtacctctgactcgcaatgatatgtcccctttcccttttgctgttttgcactcgttttctgctctggtccgtctgaacccgcatatccacctatttggtatttggcacttgagcttgtacaacttatgctgtgagacgggatctagttgaaaatataaaaagagcctctagtcccaattttctattctatcttattcgcagtatttattagtagtgtaaataattgacttatttatatgcacctgtatttctatgattctgtgaaactcctccgtcgtgacaaggacatcggattcttcttgtgccaggactctatcgtacagagtatggaattgtaagacaagaagatctccggcaattgcttgctgtgcgatgttgatttcctgggcacaatatggctgctggaaagtaggaatctgagggtatagcagcctgcttatttgatgcgactgctttgtatgtcaattgtcagcttgttatcatattgtcacggaggcacttgctgatgcacgatgtacttacagattccaggtatatcacccctctggagcacgcttgtaagttgccgcaggacttcgatatctgagacccaaagagggaaaaagcttgaacgcgggatttcagcgagactgaggtcctggcatatcaactccttaatgagcttcttcttctcctcctcttcaaactcggaaaactgttcttatcatcacctccatattgaaaaggataccaagtgatcttcctgaaacggatgaaaagggaaagtggagaatagcgggtcttgcctcagccttcacgtctgcctgaggcatccgccccacaaaaaccgttgcctggattcgaccacggacatgatctcctacttaacccgacgcccaacctatcagcgcatatggttgtgtagttagttctttgttttcgtgctatttgggctctcagccctcttatactcaacaaatagaactctgttgatcatgttctggatatccgtagggacaatgttggcacgagcccgcgagggttcacgtatggttctctttcgataccatagtcctcttgcagggggagatcagagcgcagaatctgagtccatgaatggtcgattctatcctcttttcatcggccagaatgaaaagattgccaagtgatcttggcgaaactgttgggagctgaaggagtggagaagagcgggtctctggctactacctgcttcgggcagggccagaacagccgatgtttctcgtatgttgtatggacttttagatatcttctttcgggtattcggaattagccgtaaaataaaacggggagaaaacagtggatggggattggcttataattcggtcctcttatcactccgagagcttgacgcttgtaatgtatataaagtaatagagaagtgagagtgagagtaagagtgaagtaagagtgaagtaagagtgagagtgagagtgagagaggaaagagggatgtacttagacgaaatgcagtccataaaacacggttgttcgtgagcccggtgcgttaggtccacctccgatataactgggaataccagtgcagcattcaggcctcggcctcatcgaccgataccgtatcttatacggagtacagccaatcataacttactcggccgtacagcgcggaatgtcacagatcataagatccaaccctaaccctatcactcgactacaggatacaacagttcatcgacgaaagcagcattggtatattgtaatttcaagaaaatagacaaaggaaatagttgatagcattagatattattacaaccctttagctggcccaacaatagtcgtagagacttggtatgacgcatagtgtgagcgcccatcttgcgactgatcattcaacgacaatccatccgccgaccctggtatttgatccagtcgcgtgagggggaattcactatcctcctcatccatgccatgcccccgttttactgtactgttcttgctcaggctggtaggtcctcctgtgaacggttgcgacgagtatccatcatgactgccaaacaaggacgggaaagcagccttgagaattggacggagcatgggcgcgcaggcatttccaatggcaagagcaggctctgtaacactccagaaggcagcccagatcatcgagtaagacagatcggtgaaatcaaccgtggtgaggacacggatacggatgatggtgatggaggaaatactatgatactcgttagaactttgctttgcgatggcgaacctggggggaggagaaagcttacaaggcacccaatccaaagatcccaaccaatcccatcttagtcgcaaccgacatattcaggttccagacaaagcgaactggcaacgccacgatgatcatatcggtgatcaggttaaaggctccaatcgtcgaaaatgccacgttctgattcgcgcagtggcccggcagagtaggattccagttcctcgcaaagggtgtgcagatcaagaaaacctgcagcatactcccaacccagtatgcggccgaaaagcctatacaggtccacgtcaggatgcggaattccctggacacaaagatccgcaagtagaaggctaggtaggagaacttcgccaggaccatggcattgtagtagacgatctggtagaccatgagcatcttagcgatcactacagcattctctgagggaatctccgtgatgtggtatcgcatccccacccgagcgtagtggtactgcattgcgagcatgccatatgtgtggaatagtcctgcaacgcagaatgcatcatcccatcctgcaccggtttttcggagtcggcgggagacaccacgcaatatcacgagtagggttgcgattgcgacgaggaccgtgttagcgatgagctgatcgcgcacgatggggaagccaaagacattgtataactgcattttcccattaactcatccgttttcggtttttggtgtgctgtacaacatgtacacttggggcatatatggttgcaaagggtgaaggatctttaagagccgtgaagaactgtcagtcgccgggtaacagcaacattgtctccgtcaattgtacaaagtactatgcactacggtttcaaactagccactcattggcctgtcaaggtgatcagcaggagattatggagccgttatggcgggccgttttattttaacccaaattaatttcccagagtggacttgcagagagaataaagtggctgtcattggaacgaatgtcaacctagttagggccaagccaaacttgtaaagactatttctcctattatgtccatgggcttcggctattaacaaataacggcctcggtacactccacccccgtacacctccttgtttctaggggcactaacttcactgaggtaaataacgtcgggaacaatttacggagtatgagctagtaacagccaccaagccgacgggatacgaaaccctagaaatgccgcgtggacttttttatctgctggcagtcgattgtccgactctcgatcttaaatatttctattattgtcatttcccctccatactggaaaaagattcaagtttttttaactagttacttacaacatggatgactacgactatatcatcatcggcgctggaatcggcggtcttgttctggcaaaccgtctaagcgaggatccctccgtcagtgtcctgctcattgaagctggcgccaatcggatgggagatccgcgtattgatacgcctggattgatggctaccatgtatggtaacccggactttgactgggattacatgagtattccgcaggtatgcccgtcttaaacatcgccttctcggatgaaaacctgattaatgaaaaggtccatgtgaaaaaccgacagatcggtcagccccgcggtcgggtcgtcggcggctcttccgcattgaacttttccgctattgtgtaccctgccgcgtcgaattttgacgcgtggaaggcgctaggaaatgacggttggagtgccaaggatatggccccctatcttcgaaagttccactcgtatgtcgcccctagcgaggccactgccgaactactcggcacaagccggtacatgcaactcgagaaccaaggatcgaatggtcctcttcctgtaacttacccagatatatatgggccattccacaaggcctggaatgagacatttgcgcaattgggctgggaaaccgatgccgaccctattgatggccacaaactcggcgcttttacttccccgataagcgtcgatgtcaagacgggtaaaagagggtatgcagcggcatactactcccccgaggtcgcggcgcggccaaacctacggcttcttgcagagacaatggtcgagcgaattatcctctcccaacaggagggagatgtcgttgccactggtgtgcaggtcaagactcaggacagttcatacgagatcaaggcaaagaaggaagtgatcgtctgcgcaggcagcctgaattcccctcaggtgctcgagctctcgggtatcggcggtgcagatcttctccagacccacggcatcccggtgatcatcgacaaccccgccgtgggcgagaatcttcaagatcacagtatcgcgagcgtcaactttgagatcgccgatggccagatctcgggcgatatcatgcgtgatcccaacgtcgtacaggcagtcatgaagctctacgaggagacgcgcggaggcccgctaaccggcatacctctcaacatggcctatctcccgctagtagatggaaccggcgtcgtgccgaaagaagaactcgacgccctgctctcgaaatacctcgacaacgacagcacaccagctagcctgcaagcgcaatattctcaaatccgcagtatactcctcgaccggaacgagaactccacgcactacctcttcctccctgcccagctcaacgggaaaccagaccaaacaaccatcaccgacgtgctggccaaagttcacccggagaactacatttccatcatggtgctgcacaaccacccgttctcacgcggctcggtccacattgcctccggcaagagtgaagataagcccacctacgacccaaacctgctctctcacccgcttgatctggagatcatggcccggcaggtgcagtacatggggcgcgtttccgagactgctccactctctggtctgctcaaatccggcaagcgcatgcctcagagtgccatcgatttgagtgatctggaccatgtgaaggatgtcgttcaggatctcttgttcacgtgtttccatcctgtgggctcgtgtgccatgctgccgagggagcttggcggcgttgttgattctgagctcagggtttatggcaccaagaacgtgagggttgttgatgccagtattttcccgcttgagatcgctggaaatatccaggctactgtttatgcggttgcggagcacgcagcggatttgatcaaatcccagtagtcgggtttggggctttagattgcgtgacaactagatatgggacattacctctagttgtagatacctcctgataggacatgttcattctgcagattgtatctaggcaaatggagactatggttttacagcgcgaaagtctaaatgtttaacaacaagctaaggttacgaggccgaatgcgggtgggctcagtacctctgtactgagtgttactaagtatggatgattgattggttaaagaactaatgatagcgacagaaactggggttgcacaacccctccgaggtttctccgctgcatggcagaaggttttcacggttaggctcggtcggctcgggccggttactcgatcgataatctaaattagacagacaggtccagaaattgggggcgggatcagaggacccattttcggacatagactcaggtgactttgatattgtgaaaaactatgaacgagcagttttataggatgttcttcaagccactctcgggtttagtttcatccactctcccgatactaatcgacacttatcgacgcactggatgaatgtgattcggatgatgatatgcaactcatactctgattcacagctacaagatttagaggctctgcatgtgcgtgtgttattttcttgtccaggcctaaatcgccaattctccaagaactatcaacgatccccaatgaatacgaaggatcctttttgagattcccaaagcagtgatgacaacatcagagaatcaagtgtctaatggcaactatctcattccatagttgtctcccaacctttttcaggtataacatcaacccaataagcatatatttgttcttagagcaccgactttttgctgtgtggatggaccccccaccccttgcctaccgattggtttgggaacgctaattttcaatagctaactagtgtgtccgtgcgatcgtccgtgtgattgcttaaatttgttgctacataccacataccgtatacttgaagatctctattgagacctaaagcatagcctcgatgaggtatcgacacgtagaaatgatacatctaatgtaccttcctgtgctcgagaggttatcggcaaatgaggcgggacacagctaaaagcaaatggctcatcaattttagcaggtgatccaatcgtggtactaagacccattcatctcgcttgtaaaccttattttattggcctccctcggagtcttgtcaatctcagactaatctcactacatttgggtcaagtgatcagaatttgccggtctttttgatccaaaaacgcactcaatagaatctactctatcagactctgatcctgcctctatcgtattatcattggagaactacatgggcttttctgcagtatggcaataagataacctcatacattcggccgttaagatatagctcatgcgacatttatctggttgttcctttctttccttgcccatctatgtatatcctctatctctcggacactgatgtagacttattgactcgcatatcattttcccctgctatataagctcttccacgcttccttctgcgctttcttcttctttcgcgaatttctccctttccttttttccaacataaattatccgtacaggtgccctctgatgtttatttttggttatttggctactcggacagcctttactagccagcacgaacactatactcgaaggctggcaattcgatgacaaccccgatcaacatggtagatatgcttctctagaatcctcgcctgcaactgagccattctctctgtcgacgtcgtaccacgcagctatagtgtagtttgagaaataccgttaagatctttccatggccgagaaccgtgctttgtccctggtggcatggttacttgctctggtttccatgatgaagaccgatcgaagttcgatgtcctgtagggtatttacagttgtcacattctctggccgatgttcaatattgtgatgcgcgcgcttatgtgctgtccatagcccaatgatatggtgggttttgagggcgtgttgctagcatatatattctctctcacattggtagggactgtggggaaactcaaaatccacaaatgaattcccctacatgtatgatttggagtataataaattgaaatgaatatttattgatactaagatattcgacctgtaatgtaaaggaaaaaaataagtaaaaaaaagtaaaaaagaagtgataagagtgggattcgaacccacgcctcttgcgagaccaggaaactattgctagttatggagtcaaggtataccttaacctggcgccttagaccaactcggccatcttaccaatcgatgtaaggtcgacaaatatatgcctatatgaacggaaaataagacagatgtggatagtaccagagccagttgcttcaactgtctaacaatccgaagtcgatcgaaaatgaaaacttttttttatcagtctgggcttcgtgcccgaatattaaatctcgagtgccctttaagacttgccgtgggaatggctgtagagacacctagctcaataattatccacatttactctacaaagtttttttaggtagtatacatatagaaatcaagaaaacaccgcacgacaaattgttggagtgaagtatctgagattggttcacaaccaccttctcctttcaagttccagatcaaacgaaaagtggcaactccaggccggatttcctcgggtggggctttcctatttcagctgtgaactcatcaagtggcatgggcatatcgaactgtacttttcagtccgcctgacctttcatttaatcttctccgtacagggaaaccccatgccatggcttctcttgaccttgaaaaatctaccgggagcataacaaatgcccgaaaggggccagtgcatcggcagaggaatgttctcggcccccgagatcggaagcggacagctctgacgcaaggcgctttttattattagcacggccacaactttccatggctgggaacagactggtccactcccaaaagcaaactaatcagctgccacaggattcttccatatggctctttgcagtcacaggaaggtgggcacccttcaggggtggcggtttgaggccacatgatgtaatattcgcccagggcattttccaggatcagcggtcaaaaccagcggtgaccctctcaatctgatattcagccccaaacatttctttttttctcaagctccctcttccttcactccctctaatcacaatggcacctctaaagctcaacatcaagcacctggagcaaattgcgcaggcaggcaatgggccaatccaaatcccaaagcaccgtttccgcaacagctctgttaaagagggaatcgtccacgttggtgtgggtggcttccacagagctcacctggctgtctatgtcgaccagttgatggagaagcatggtgttaccgactacgcaatctgcggtgttggcttgcaacctttcgatgctaccatgcgcgatgtcctgagagagcaggaccacctctacaccgtcatggagcgctctgacaagggaagctttgcccacgttgttggatgcatcaattcctacctcttcgcccccgacgatcgcgaagctgtcatcgccaagatggcccaccctgatacccatattgtttcgctcaccatcaccgagagcggctactactataacgaaaactcccacgagctgctgagcaatcaccccgatatccagttcgacatcaagtccggcaacgagaacgccccgcgcacaaccttcggcttcctctacgcggccctcgcacgacgctacgaacaaggactcaagcccttcaccgtcatgtcctgcgataacatgcagaagaacggctccatcacacgcaacatgctcgtgtcctttgcgcgtttgcgcaaccctaagatcgcggagtggatttccgagaagggcgccttccccaacgccatggtcgaccgcatcacacctcagacatcagccaaggacaaggaggaactcgcggaggactttggaattcaggacgcatggcccgtcgtcacagagccctttatgcaatgggttatcgaggaccagttctgcgacggccgcccagaattcgagaaggttggtgtccaggttgtcaagaacgtccacgacgtcgagcagtttgagatgcacaagctccgtctgctcaacggcagccactcggccatcggctacccaggccagatggcaggctttgaatacgtccacgaagtcatgaagaacccgaacatgcgccagttggtgtgggagatgatgcaagaggaggtgaagcccctcttgccggatattcctggcgtcagcattgacgagtattgcaagacgctcatgaagcgtttctccaactccaaaattaaggatcagctgccccgcatctgcctcaatgcctctggcaagatcccgcagttcatcatgccgtcgattgccgaggcgattcgggagagcgacaagaagcagatcgaatatcctttccgccgcctgtgtttcgtcgcggcctcttggttcctttatgtcaaaggtgtcgatgaccacggcaagaagttcgaggttgatgaccccatgcgcgaagagctccaggctgctgctgaggccggccatggcggccccgaccagctgctcaacatcaagattctcttcggtgacgacttgcgcggatgcaagaggttcacggatgagatgaagaaggccatgacagacatcgcggacaagggtgtcttggaaaccctcaaggtctacttccctgaggacaccaactagtcgctgttggtttgacgaaaaagttacaattgcgtctgcgagcgttgtttttacattttctagcatgctatctaagaaaaaatacacatacagatagatggtagacaagacttgcctactactccgtatgtacttgtatattgaacggatttctttaattaggatgagttgttttctggattaatttggagaaacgtgcgaatttcggtggcgggtgatatagccagatctaaccaatgtgaatcttaatgttattacatccgatataaagagctcgggagcaactttccaggccttgtaggtggagtagaccgatggtcccgtgggtcagatgagcgtgctcaattttacattgaaaagagaagtggacacctgtaaaaaaggaaagtgacgacgtggtaaaaactggagcatatcatgcgcaggccaatgatggttcattcatgagctatcagaatgaactcagtgacaacatgaaatcattacattcatgtagccaatcaagaagtcgattgttatcgcgattaattgactggaagagctatatatattggaggctctcggaaaatctatacttattggtgtctggtacaaaatataagctacaggaagatttgttcaaatattcaacaatgggattttgaagtatccgggataatagaacacccgctagcagtttaaaaaaggagtatgtatgaacaatgttacaaaaaaagccaacctcataaatccaacacataggtgaatataaggcagcgagtacaacgaaagacaaatccaaatcatgaatacgcaaactcaagtttacagcataaccatgaagataccagaggcaacggcagcgaccgcataggcaccggcctgccaggcaccaatgtgcacagcatggggaacggtgccagcagcaataccagaggaggtagcaccactagtagaagagccagaagagccagagccagaagcaccagcagcagtgctagcagcgagaccagcactgacggcgccagtaccagccgagccagcagagctcatctgagtagcgcaggagccagaggcagaggtagacttcttggtgctagcgacaccgttgaagccacaagcgtcgctaccagccttggccttgttcttctggtagtaaacgttcatagcccaagccagctgctgcttaggcgagcacatggagtaggcaccgtaagtgccagaagtggagttggactggactccgtccatgacaccgctctcgccgccgaggtagccgaaggtggttccgatctgcttgtcggtgatgtcggagttggggacacactcgagggagttgtacatgcactcgcagaggtctgcgttgggcgaggggggcagcttgctggcggcgttccagtccgagccgatggtgggacagctgcgaccgacggtggtggagacggagtacttgtcggagttcacgccggtcggggtggcagaggccatttgcttggagaggtagctgaagtctgagagggtcgatacgtcgtcgccggagacggtgacgaggccgtacttgttggcttcttcgtagtacatgtagacgatgccgccggaccagacgtcggtcatctggtcgccgaacaggacggggacgtcggtgaacttgcgagggcggacttcgttgcagccgtactcggagaagaaggcggggacggggtagtcggcgaattccttggtgcgatcggcgtagccggacttctggtagctggagtcgccgcaccactcgtagatgttgtagccgaagaagtcgatggagtcggcagcttcgtcacagacgaggtagttggtgatgtcttcacggacggtggcatcgtcgtcggtggcgtagccaacgccgagggagctacggtagttcttttgcttgatgtaggacttcatgtcacggacggcggccttgacgtaggccatggaattggtgttgttgaccttgttggagacttcgtttccggcaaagaagccaatgacattggggtacttggcgaaggcatcaacaacctgggagtagcgagtgaagagatccgagttccaggtcgggtcgtcggattggatggattcgctaggcgaggacagatcggtgatcaaatagataccggcatcggcgagggcagtcatacactcatcgtggtctttgctggggtcgacagcgtatgtacggacaacgttggtgcgcaattggacgaggtagggaatatcacgcttgcaggtgtcgatggccagcgggtcggtgtaggtatcggtgctgtcagcaccgttgcgacccgtgaagttgggctggtaagcgacaccacggatgaagaactcggtgccgttgttggagtagaagaatttcttgcccttgatctcaatcgagggaacatcggccgccatggccgctcccagaagggagagaccagcgatgatagaggccttcattgcgcaaaggaaatcgaaatcctaaggaatgtcagacggggtacacaccgtctttcgagatagcgaatgtaaataagtgaaagaaagaaagaatcagaaatctacaagatatgtaggaagggaggagaagaaaagagagaccctggaagggggaagagggtctaaagggggacgcgaatttatgtggagatatccagtgcatatcatttgtacaacgctgtattgatttctatttataccggatttttggtttttggtaactccagtggcagacgtgattggcaatccagagacaaacaaaccttggaagtggaagatgttgatatttcgtcattggccccttctactccctgcctccgctgtccctgcactgtgtctccactgggactccactgtcaccccactatttcctcggttaagcctttcccgttgagtccttttgcttatttgccacttcccctgagacatgtggaggcgctagtgagcccgtggacgggctgatgctgcgctaaagaccctgggaagaccctgactggaggacagtgtgggacttcattttctggtaatctattggaaagtcaattgtttacagaatactccatcgttgaacatctacggaatacacagacaatattgtatagaagagagattcaaagaagaaagcttgttcattgccaagggcgatcaatgcaatgacgtcgattggaatgaatccgagcatccttggctaaggcttgaccattgtaatacgtagcacttgaaatcggaaatatcaggattaataaactgtaatccccgtctcaaattggtctagccttggtgatggtagagtacatgtctctgaaggtacggagtacttctggggcatttcgggctaatatttgtcttgaaacatgtctctaatttatgatacatgctcttggaccggacaatactataatttaccattgtacagcagctaaacatcttatgttatgtatatgatacaattgagtaacattctattgtttcatattaactagggccaaaccatctatatcataacattcgatgttttctttttctttttctctatacttttactatacaataacagtagagagatgcttgtataaaaaataccatgtatccccatacttatacccaacaagccaatgcccgggaaatttgtccagaaaatgtctcggactgataatgaagcaaagagcccaccgagactccatactaagcgggatattaggccgccacaaagcttggtaaagtaaaatatgcactctgtactccatatatgccccgaaagggagatgattgactttctcgtagcccgtacctacggagttatatgcttggacccgcttttggcgtgatctatgatattcaggggtgcatatacccctgaaatgcactgcctggttctgtctcgaaccgcatggtttgcgttgcgctgcatgttgggtcatttcataaatatcctagttgataatcatccccatgtagaagagggctgtgctaacctaacgggaggaaatattactgcctgctgtgccgtcaggcaaaattctctcattcttacattgaaaagccaacttaaataatcatttcctcatccctgcgctaggcagacagaaaaaaaaagctcaactagcagcagaaaagaagggttctcgtcaatggcatcctgaatgttgatggagggattcgtggcgttttagatgataggaccgattgtctcgcagagggattagttgaaccacttgaccgtaacggcgatgcccttgcagcaccatatatgccatattattggcaatggttgcccagccatcccggcaaactgtatatgcggcaacagaccatttgccagcattgcttagccgaacagtgcctatctgttaggacaccccacacgataactattccaaaatattgttagtaggggacgcttggtacgttatatctcgacttccaagagattacatacgtatatgtatataaatgttggtccatggcagctggttgaccttctgacgaaaacccagtggacccaaaccctcttcaggcccaaggggaggcttcttaatgaaatcttatagtcggatcgtgtcgatatcgggcgaatttgagagtttatgaagtcggcccttctagcttttccaagcctttggatattcgccaacggttgcattttgagtctttatgaaaaaagagaggaaagggctggtttctgattgcagggtatgattgctctctaattacatggcatagaaagctcctccatgtgcactacacatattgtttaatccgagttctcatatctgacaagatctgaactctggcagcattacccttcaccgatacagtctcaaccgtggctccatagtcattcaacactgtcctccacgcattatgaagaaacgggcttcaaggccaactaccgtcatgccataaacagagctattttgggctcgcagtcccccataaagcagtagatgagtgttcgcaatgagggaaaaaagactgttggtccaagtagaagatgaaaatcccgaacttttgactttcatcactattagtgttggccgacagttcaaattggacacaactttgttgagcataccagttcaatatgtaccggacaccgataacgcaccccacactacagcaaaaggcgctgagagatagacgtcattcctcaagtccagaatacttttctttgcaggtcggtatgctcgggcagtactgtggcaaagctcacatccccacaatctctaacggttgacgaaggtatctggccaagagaagaagtgtgatcaaccagaaagatgatgatatgaagtggatggaagatgacgatctagctattccatgaagctctttatatagctccatagtgtatctgatccatttggttaaacaatgtcaaagtccgacgtagaaccgagagaacctgaaagtcacatggcccaaaatggctagcgcgaggtaggcagcaactattttaagggcccttaagatgccgagaacccatagggctgaacttttctcttttctgagaatttgtatgttgtacttactccgtacagacgacggcattatcatttgattcgaggttgacttcattgactccccttttactctgactttgcttctcactctccctcgcttcacttcagcaaccgcccgaccgcagagcttacagcacagacaccaaccaacaaactgaaaaggtgacagccaactacgtcgcaacgcagctgattgagctgagtggtcatggatattccctcgggatgacgacagccataacttttgagacgagcccaagccgccaacatccgcagtacctgcccgagcagggcctagttgatcattgatcacggcctcatcacgaagaggctgcctataacaaatgccaatatagacactgcctaatgatagtattacaatctattcttgggagcgtacctcctctcagagtatctccaaggctcccggctgagagcacgggagcctgcccaggtggcgctgctgagcgcttctacgggcaccaaccaacaaccaacaaccccgaaaaccaaaccttgacaaccaacacgtgatcgttccaatatgcgtctggcttgacctcgggacgcaatcaatgacataggaaaaggggttgtggcgtccaggcctgatgtggaatcaacacgcgagctgattgaccaaacactgccaagagcgggtcaaaaccccctacacaatttatgctggagggaatttcccccaataaacaggagacccatatctgccgctttctgtgccacgatcgtaccgctactttgtatatcgtctaccaacatctgcaggaatgcccgagaaaatttatcagatgcagtgtgaccatggtatttgactgcagaatgccggcgatcaaccaagtttttgccaagtcacccaagcacaaagcttccaccgacaaagctttcagttccacctggccaaggtttcaagtggcgctgtagtttttgactgccagcgcaccaacatccatgatttgacgatatctgacgcagtcgtgcgcaacaagaatttataaagtggaattgaaacactgactggtccccaactaccaactatccatacaaaccaatctcgcgatccgagtttgtttttttctagacgccaagatcacaatatttgctccactatacacactatacgcaccacttgtggctgtgcctttcaactcttttcgaagtctgttctccaaagaaaccccagcaaattgctacagacaaattctatcccttcatttctgagtcactccttttacccttcttctcgctgtaatcgtttcataattgtcattcgtttgatctttgttgacttcccgcctaccccttgcctgagcgcgactctcaccgttgcgactctcaccgttcccctgtgcgcgtgaatatcccggatccgccattcatcatcgtgctgtggctgtatcttgagacacgtccacatttcgcgcttagattgccgtaatcgcttcagcttgtggatttgttgagctgtccatatctcgaaaccgttagccagtgcgtgttcccccagccagcccttcataggcatccgtcacaggtcgcaggtccaagccacagttgtggggtgttttccccttgaggcaaattcaagctcatcaagctcatcattagcctctgctctgttctcttatatatatctctcgcaaggccactcttacttacgaatccatttctctacagaagccatattaagccaccaccatcatgcgtaagtccaacagctatgcatacccaatctatcaactggccagccatactaaacgtaccactagtcaaaattcgcagtaaagcccacttcgcagcacgttacggtcagaaaagagccagccgatcgaactctttgcagctcgaggatggactatcccattcccagaccttgggcgaactctcagcagaccagcaacgccgacgggaactcaacgacggcattagcgtcccagagtactccaacacattcccgccggagttcgctggtagcgaccatgaaacacacaagtccccgcctgaaccgtccatggctagccaggacccaatcaatgtctcatcgtcacgcgggcttgataccgagaccgttggatcggcgcaggcgcgccagcggaaaagtggaatcttgggcaagttcaagcatcgccatgatgacgacgagtgggaggacaagaagtcggagcatcagacctacacttttgcgtcacagataagggctactcttttgaactcgtgggtcaatgttcttttgattgccgcacctgttggaagtatgtcttgctcctgccactgatgtatggaagtgcacgtgctaattctgttcttgcgcatagttattctctatgctgttaaagccaattcgattgcagttttcgtggttaacttcatcgctatcatgtgagtggttatgccgctggctaggacgaggatatcttgctaacaggcatttactagccctcttgctgccatgctcagtttcgcaactgaagaaattgcccttcggtatgcttcaatctaccccattctgtttggtctatgctcatctcttctagcacaggtgaaacaatcggtggtctgctgaatgcctcgtttggtaatgccgtcgagctgatcgttgcaattatcgcgctggtccaaggcaaaactctcatcgtgcagacctcgcttatcggaagtatattgtctaacctgctcctggtgctgggcatgtgctttttcttcggtggtatccctcgcatcgagcaaaatttcaacgtcacagttgcgcagacagccgcaagtatgctcgcactggctgttagcagtttgatcatccctactgcctaccacaagtggtctgatcgttagtgcatccaggacccgcaaactgagacgagagctaacaagaactttgactatagttgacaaagttgacgggaccgcctctctatctagaggtacgttacttcctgggactactagccctgctatcgctttcacttttgttactcacaccgcaccacaggcaccagcgtcctccttctaatcgtctacggctgctatctcttcttccaactgaagtcacatgccgacatttacaaccaacccagcctgaaggtcgaacggcgacacatgaaagtcggcgaaggtgataccagccggggcattgcccagatcggcaaaatgaccgccacgccgttagtcgcacataatcccgaacaaatgcagatggaggatcccgaagatgaaaccgaggagccgcagctgtccatttcaactgccgtcatcacgctgattatctccactgcgtttgttgctgcctgtgctgagttcatggtatgcatatgcctttcccctagatctgttccgatctttattaagtgtgattgcagtaagctcattaatctatgcaggttgaatccatcgatgctttgacggctaccggtaacattcgcgagacgttcgtcggattaatccttctgcctatcgttggtaatgcggctgagcacgttactgcggtgacagtcgcatgcaaggataagatggatcttgcgattggtgtcgccgtcggatccagcatgcagattgcgctgcttgtgttgccgttgattgttgttctcggatggatcattggtgttgaggatatggtatggagcccaaaatttagatcttatcgggcctggcactaacttcgacagactctcaactttgatggattccaggttattgtactattcatgtctgttcttttggtacgtggatttgattctcaagaaagtgataccgtactgactgttcttgttaggtcaactacctcatcggtgacggcaagtctcactggcttgagggtgtcttgttgatgatgatgtatctgattattgctcttgcgtcttggtatgttcttgttctatatggttgacaagtggaatctgtcgcttactgattgcgtctctaggttcttcgtttaaacacttacactcattacagtcatcgggctgggtccccgttgacgatacgatatattataatttaccatcctaatcgcggggacctttttggttattatcttttctctatcacatttttatttggttttatttggttttatttggctttggattctattatgatcgcccataatatacccactctcgcggtgctttgcatgtccgacgcatttaatttatttccccgagataaaattgatctgtgattccataacagtctttcacaataatccacatcacaaaaatcaaaccaaataaatagccggacaagagctattcaaccgcctacgttgtcaggctaaaaaagcagggctgactaattcggtaacttttccccgaagagtggggatgagcagcgctttcgggactgaatctccgacaaattcagactcagcacacgaaatacgcccgtggacgaataaacagaatgcaattatgccaacagcacagtacggtacggagtatgtcctccgtacatccaggcacgatactgtagccatcggggaattaccgggctgaacaatcatgcacggtaaggctatccaaatccggactcggcagactcggtatccccccgatgtttctaaccgagccgatgtggggaggctgggatttacaattgttcctggcttgttcttcgaacccttcccatttttactgcggagttctccgtacggagggagtacaaagtagtggtcctgggatcccgcatctgcccgggcctggactgaggtttctttcgaagcacctcgccgtaaattaccacatgtggctattatcctaactggtatgtatgttgtatgtatgttgtagagaattccgtatgtcatgatatgatatcgaataatcagtacaaactacctgccgaatcagatggggtcggcaactgctccgcgccgagaagggacagggaggaaaagaggacttgatcccggacggaaattgttgggacgaaatgaaattcaaagccactttggcgctggaggcttcgacactgccgattggattggacggtagtccggcggcacgggatgcctcggataatatgaggaaggttaggagtttcctttattaatcttgtcacctgagaggctactccatatgtggggtagagaacccggatcgtgaaaggactgtgcagaggcagttagggtagggcatgcaatgttaatccagtcctccgtagttactccgttccgtatgtgatggaacatgttcaatttgccttttaggcttccccactgttatccaccggggtacggaggacaatataagaaccaaaggccggaaaaatataggcagatggccattgaccccgagtctctcttgtaaagttactatacaatacaagtccaagtctacgtcactataatatatcgattataaaaaaaagaacagacccaacttcttacctaatacaaagtaaatgcggggttatccggggtccaatggctggcgcctcggaggttgcggtccaatcgcggtatcggacggggccgaaatgtgaccggggggaaaaattcggtgtatgaacttttccgatgtgtgacgttcctgggcatgtgtataacctcggaactacacaattatggatttggcactccgcaagggacgaaaaataaaaacatatgatcgcggatgcagtcggcctcggactgtttgcacttgtacatggatgggaccaaattgtgggagtataaggatggcagcagaaatacggggcaaggactggtcgagtcaggccaattccccatcccgtgaaatatgcgtgttcttccgaggggatggcgattcatttgaccctctgccgagcgacctgatcgcttctccgattcttccactttgtgacgggtgacaagcggggggaaacacaagcccacattgtaggaatgtcacacggaggcgtcgaatacggggtgagaaggtgaaaggtcatagccaacgccaatcaatgcagaggtaactgtacttggaggatctagcatctcacctctttgcggggagagccccgaccaggcacttggagaccgttgattggatgccatttccccttcatccccagattgatgggctgcgtggatggacggccatccatgttctggggacgaggctatacccgagggatccaaatgggccgagatacccctcatgagagagacgagaaaaaccatgtgggagaaaaaaccgccttatgggtccactggtcttctgggcgtcttgtggagtcgcgtttcggcttttcattcttttcccatgaacaattcttggttctcgctgtactctccgagaatggccccccatctgtgcacacacacagactaggtatgtatatccgcttgcctatttaggtgttcccggtgcgggaagagacggtgtatggatttcccgcccagacaaatgccgatcggacatcagctgccacggggtagacctggtcaattgcctaggcagaggcgaatggtacttttgtgctccgtgccctagtatagagttctagggcggccatggaaccagggtgtaccgcattgtacgtatgatgcgcccaaatccaccgatcccccagatttaggcactgtgactgatccctcacgggccctagaaaatgccggaaagtggcggaggagaatcggccggcgagtggacgggtattgtcattccagccagtccgggtgctttggatctggatttggtccggtagaagagacaatgtcctacttgacaggccagattgccaatttttgatttttcttttcttattttcggaccgtgagctgagcccgagtcgggtagagatgtgaaatgacgatcatgagatcagagcctggtaagaatggggtagataccgctcaggcctcaggtgtttcccgtgccgagaaggggtatattagctaaatatggggttataacgagagagatggaattggatatgagttgtaattgtgaatagttaatagctagtgctaaaacaattaaatcgttatatactatgcatctgctatacatgaatcaaatccttctccagaaacgaactacatcggcagccggaaactgggggtctccacctccacgaaaagcgcgtccttgcatgcttttggccctccgcaatttcagcggctctggtttgctcttttctctcggctctgggggtttttttttcttttcacaatttccctttttcccttcttttttttctgctctgacttcatttccccggtcgtgacattccccgttccctcccgacttgtgtttctcccggtccggtgccccgactctttgagtttcccccacactccgccaattccgttcttcttctcccttggccctttccctcttgcgttctcttttcgttcacatcgataggttgtgatatctagtaagttggaaagcgagtcccaccggaaaatgcaatattaactatgatagaaaccgaacgggtctgcgtttaattctccgagattcttcccccgcaaaataacagcgcgtgaccctgatacccgtggtaaatgggagaattgcgattgatacaaatcgcctcgcatatctgcagacttcgggtctgtccaatacaccatgcggtccagcatcgcttgcgctcgatgccggcgcagtaaaatcaagtgtgtcaattccgggatcgatacaacctgccgcgcatgcgaaacgtccgggcgcaagctcgaatgtgtctatccaaccccagcactcggagtgaacaacgccaagcgggatctggctgccctggcagaaggcgacgatcgaagtaacgactgggatggcccgaaacgacatcgttcgcgcaaggtggtgggtatctctggctcctcggctgggtccaagctcggtgtggatgcgcttgattcctcgatcctgacgaccaaagtgtgggaggccgtcttcgacctcttccaatcgcattttgcgactcttctacccttcctacatcccgcgacgtttctcggccagattcgacagctctcatctccccctcctgcgcccttcgatggacaagatcctcgcaatcctgcgaataaggtggacccgtcttcctcgttgattccgctgggggtactagccctaactgctcggtttcaccctccgttggctgcagcccactcaccagtgtcgcctagccatccttcgaatccgcttgccgcatcggaatactatgctgcagccctccgcagccggctggccggcttggatggttcttgccttgctcaacctgatcttgcgcgcgtgcaggcgttattgatgttggctttgcacgagtgggggatgtgccgaggcaagagtgcttgggtctacgtgggcatggccatccggcttgcacaggccatgggtctaccctttgaacttgaaaatgaattcccagcgcgagatctttcgcgctcctcccccggcttgcgaaccgaggcagatcacttcggcctgccgcggcgtgtagagcccagagagccgacctcggatgatattattgcacaagagactaagcgccggacattctgggcttgctttatccttgaccggtgtcttagcagtggaaagtaccggcctcggatggtccgtgtcaaggaactcggaattcagctcccgagcgacaacgcatttgccttcggcgagcgggttcggacggccagactcaatgaacccaccgttcggcgcccgcagagtttcggttcccaaagcatgcaaatccccagcatccgtcaaagcataggaggctttggcgatgaaaaactcccatccaatggaacctcagataacaagtcctggtcacctatctctcgccgcaaggagtcgagcgtggaggatgttgatcgatgggaggttggcgcagaggagtcggtactcagccgggtgattcggatcattcgtgtctggggaagcatcgctaaatggtcttgcgctggcggtcgacgcacagagcaatatcccccatggcatcctgaatcccgcttctcttcactccgtctgcagttgaacgagttccaggatagtctttcccgcaacctacaatattcccagcgaaataccgacacacatatcatgtacaagaccacgctggcttcatataccgtgatgcatgttgtctacttcctatcggtaattgtccttcaccgtgcctatattccattcctgcctatccgctgcaatgagccttctggccccttagatgagccgttgttcgctgtcgacaaggtcaatggcccacctgatggtttctggcgggacagcgctcgtgagctcttcaaggcagcgcggcagatgatcgaccttgtggccacctgccaagcccgtggtgctcttgttgagaaccctttggtcggatttgctatctacaatgccgcttttatcggtgtttatggaacacatttcccacatatggatccagaggggctgatgggaactaagccaccccctgcgagccatgatagccaccagcttggtgtcacacaagcacgcaaggccttggatatcatccgagagatgcggcctcgtctgaagatggcgaccggctggttccgcaccctgaatcgccttcacagctacttttccaaagtcaagcgcgatttccgccgggtttcacgaaatcgtctagatagcatgtccgatgcttctgaccacggtcccagtgggattcggctagttcgcgaaggtggtgctggtggcggttttgaggaattcaagatgctcgaaaagcttttcctcgactttggaagcattgaggaccagttgacagagtctgggatggatgaagactgcatcgcagtgcccgcagcaagcgagtccatctacgagcgcacgaatatgagtgatgctggaagcaatgccgtcaggagcgaaaccggtgatcccggtgaccagatgctcgacggtaccggtcgtcgcgaggtcaacagccccggtctatctctacctgggcaccaaggcgatcgccgtcccagcctaccacttcccaacagccgccaaatgccatccgggtccccttactcccttccatcccttcagcaacatcacccagacggtcccctgtacaccatctcatctcccaactacccctctctgtcagcaaccacgcagtcaccctcccagtacctgacggcaacaagcaaccgcctgaatcccatcaactcctggctcccagcccgcccgcaggttcctcccccgccatactcccaatctctccctcccatcaacgcagccgcctcacacaccatccctgtccttcccccaccgggatccgtcactcaattagccccctcgccgcctctgacctcaacggaatacccagactcaagcctgctatccacgagtgtcggtggagacgacgtcatcgccttcctggatgggtgcgaatggagtcagctatccatgctggcgccttctgagatcggtattcccgccggttggcttagcacgatctggtccccactcagccgctaggtcctcattcagccgctagagttcccacctctccagcaggcacgcatcgaagcagtggcaccaatcgccttgcttcattgtattattactctttacgaattccctcgtccgttacgtcttacgtactgtacgatcatttctgtctctctctcctttatctatgatcgctggcgactcaaaaaatgagacatatcctgcgggaaatcccccgagtgccgaaagcaggcgaattaaactccaaatccaatcatttcctttcctggtctggcctcctcatttactggcccagactcggaatttgaaacgggatcacgaagattgattatcacctatacccagtgcgcgcgaccttgtctttttctatttttgttcatgttcatgttcatgttcttgatattgttcacttgctacctgtcctttctttttctttgggatacgctgttcaacatgcgtgcaaggcgttcctcgtgatttcccgccaaggtggccgtgaaacccgagttgattgttcatttatcggcaatgtttatctccatattggtctttgtccgtttgtttcgagcgaaatttggggtggcacgggagcctggcagcggtggccggcttttttgacttttgttttttttttttttttttctcctgtgtcggttttacgtttttacgatagcctaggcgttgcatttgtcttgcaaactgcaattctcttgggtcaatttatctgcctctgtggctgttttttatccggcattcacttcttcccagcgtagggatagataatatctctcatagaagtacgggtggaaaatagtcatatatacctgcaccatacctataatttttacacgtgagatcttctctgacggttctaataccatccatccaccaatacctcacaccttgaatgctttcaatctatatataataaagcaaaaacaaaaaacatacaacagtgaggattcgctggtggtcacccacccaactactaactcaccggcgnnnnnnnnnnnnnnnnnnnnnnnnnnnnnnnnnnnnnnnnnnnnnnnnnnnnnnnnnnnnnnnnnnnnnnnnnnnnnnnnnnnnnnnnnnnnnnnnnnnnnnnnnnnnnnnnnnnnnnnnnnnnnnnnnnnnnnnnnnnnnnnnnnnnnnnnnnnnnnnnnnnnnnnnnnnnnnnnnnnnnnnnnnnnnnnnnnnnnnnnnnnnnnnnnnnnnnnnnnnnnnnnnnnnnnnnnnnnnnnnnnnnnnnnnnnnnnnnnnnnnnnnnnnnnnnnnnnnnnnnnnnnnnnnnnnnnnnnnnnnnnnnnnnnnnnnnnnnnnnnnnnnnnnnnnnnnnnnnnnnnnnnnnnnnnnnnnnnnnnnnnnnnnnnnnngcgctagaggggaacataaagcagctgagaattatagactacagctgggacaagatagtttatatctcatcgtgaccactaggtcatgtgacctatacgcctagatggtcatagcgctagatatttgttggacatggtggtcacctgaccatcagcccggtgcggcaggcaccaacccccataactagatagttgggcattctgccctttaggaattgacaactgtgatacccctaggtatggaacgcctaagggaatgctatatctaatggaggattgggaaatagagaccgtagtatatatagtagtatgtttagaactaatagctacttcttctaagaagtagtattaaaagtacacgcagtaagagtaatagagctaatatctccgtttcgaagagcctagatagctaataaaagcctaccctcttgctgttctaatttgctagcggattgagagcgaattggtggcatggtgggtggttgaactaactaggtgctaattcatggacgcgttttgggtaatccgcttattgtacatatttttccttggatagtagggtgtaccaaaagcgggctttgactgtactagtaatcgagtaatataaccttggtgtgtaccctttcagtctagcggcattgttgctctgcaattcttactcttgaaattctcatgaaacttccaacaatctggccaactctcttgtttcttcatcagctatgcccgattccaatttattcagcaacactggcctcccggaaagatttgtcttgacgaaacttcaagtccccggagagcttgatgatgcgcaattgacagaatattttcaaccattgcttcacacccctggccacaatcgctctatgtggggaatgattcaagataaacccaaaactgctctactagcgacttgtaagtagcgctcgggaattctaaagataaagatactgacgtgctcatgaattctcagtgtgggagacaactgatgcaataaaatattttcaagactctccctcagcccagcttctctgggaaactttggcagcaaagaacattataatctttagctcccacgaaaccccttatgttgggaattggtttgaggtcttggattcttcattcattcaattattctgggtctacttccaggctcctgtaaccgacgctcagaggactgaaatttcaaagctgagaggccttcgtccgccagcctcgggcttcagcgtaccgagacatcataggcctcaaacagaaattccgaccaaggcatgggcgacccagccagaaagcaatgcgactcagttgatgctgtggccacacttttggcggaactcggaaaaatccgagtggaggcacggattgacagaggtgttatttggcagtacaattataggcaagcggtccagaattgacgatttcgatgctaggctacaagaggtgggctcagtgaaatggacagaagacttttgctctttccggaggatacgtgcttaacataatttttcgggctttatgaaaaacgttatctaaaatcattctagtctaatatttcagtggcaaaaatgtctttcttttctcgtcccgcttgcttgatatattgtacgcctgatcataccgagcttctactaaactctgtcccacgatccttttcactcaattatagctgaaggagttcacctgcaccagaatggaaactctacctctggtttgtcgaagtccactgagtctgctggaagtaccaatatccaacaccgaaccacacatatgtctcaggatttcgtcgaatcaacgtctggtaatttttatcgtagccgctcgggattctatcgggggtcttgaggtatttttgttgttcggtctatgaatctttatatgattagtaaaattgagtggttgcgaagtttctaaacttacaagtactagtaatatctggagtctgttcgtttccaatcgtgagatggaacagcttatgatagaacgtaccgctctgtgggagaatatctgtgatagaaaggcccttcgcgggttccttgtctctaagcgtttcaccggctttgtcatttgtaaatgcagatggacataatgtgatagaactaggggtcgtttcatgttgggtggctcccagatgactattgctcacagtgcagtaggttttgcctctgtaattaatatcgaagaggtactgccttatgtcatccgactaatacggtacctgattattccgtatactccggccatttttttgcaccgtctaaagtatttcctgataagacggaatattcttaattgatactgggctcaagtggtcactggtagtcgagttgtatttaaagatatcatttctattcacatccttagctacgttagaccgctgtagcttttggagccacttgtcgttgcagaataggtatggaatgttggctgttgtagtctgtctatccaagaagttctttataatttgaaggttcgctattgtcttgtcagtacattgcgttcctttaggccatattgggaaatttactttgaacgagattcattgcgtccgtattatcgggggatatgttgaaataagactagagataatcctttgtaactttattctctgacgcagaaggatttttggcatcgcttagtgcctgaaggcctgtattaaccaaagtcctactctcagacagccattttctaagcggatctgggagctgcgagctatagccgccatctgagtctgtgctttctttgatttgaaagagggagtcaagacttggtaaggcgagcacgatgggtataatatagccctaaactagaactagaaagttgatatgtatcgccttgatcaagcgcctttactcaggcgacgtggtatgaggatgtcggagaagcctaagaaatagaataatttgaacttattctcactacttcgcttatgcagtatatcttatatgaaaataatcgaattatccaaaaattacatatgtatgcctatggtattgttactgagacataatgtcggctctctttcggtaaaaaaaccatcgcagggtatggtgaggcccttctaaggttggttggtcacttatatttgttgaggcgctaagctttaggaataaaaagtcttaatagccttggagattggttttctaccgatgcttaagagatgataagaactgcgacgttcttggcgtaaagatgtgagatatgtggagttgaaccgccagaacattttaactagtggatcttggcgattactgcaatctccggctttctaaagataatacttcacaatagtttgaagaagtcgcaccttactgcataggcactatcagccgtgtacggtgtcatttctgtggtcccacatcgtcggtctactcttggcctttttcaatttaaaatttgaaggcatacagccacaatgtaggggaaattatgcctaaagggctccggtgaagtttgattgaattgattgaacgaaaagagcagctaatgtccaatcagtgggttgtagaatacaatatttgagactcatattattcaatagattcgggatgtggttagtctactctttcaaccatagactatgtttagatgtaacttgcagtatgttgggtgaaatataaagagattgatggtgttgaaattaaaggtatcctacctacaatttcagcgttttctctggacctttccgctagaagtattatttcttcactcttgacaacttactgtcacaaatggcatcgacatctttattattcttcctggctgcccttgctagcatcagcggggtctaggcctcatctgaatgcttcaaatccgtctacaacgagacgatcgccttatttaacagtgtaccttttgcttacagccttgatcttgatacggtaagtcattgtcagaactggtgtaacgaaatccctaagtgtcaggtgtgggtttatgtcgaaaattccggccattgtgacctttatcgtactgggccattaagtctttcggataatagcggcttcactttcggtggatgtgaacctgccaatgtaactcgacctgttgttactaccatagaccgagctttgattcctacgcttagtagcactcctgtggaatcaggagacaatttctcggtatggatctaaatcctttatggcgttagtatttcatgttcctagctaaccgtctgttccttgtagacccatgtaaggcgcgaagtgggtcagcactgacataaccgctaccaccgataagggtctaatgcgtgagatggtggaagagcctgagaaagtattttgaaatcatgtttagagttaaaataaatatagcgattggtcaattttatgataggcttagggaagacttctctctgttgtattattagtaaatactaaactgcgtttgtctactcaattgcgttcatggtagacagataagttagacctaggacgcggggcaaagatgctggtaagccgaatataacgcggagcacaaaatgccgagtaattctgaacctatctctatccttcaatcccacgcgaggttaataaagccactgtgctactaaatggcagcctaggtggcagcgctagtgtttagtgtgataaaaatttccagggtcagggtccaagacgctaattttcggatgcggcgggtcctcgggatacgctgtgaaagagatagcagattttccaagtggtctgtgtaggtactagattagctagtgataatttctttagcgttgaaaatattcaaaggatttagtctggtgggaatcagttcgctatatcccgaaaacgagaagtctgtatctggtagtaactgcgctcagtgcgccacaataaagtagatgacctaccctgcgccgattttgcgaaggtgattgggcattctagttcccgaatcgagatacctgacgagataagaaatgtaacgcagatttattctaaacgggaaccaggcgcttcatttaagcaccggagggcacgttatcccggtattattatcgaggtacgctcttcacaagaagtctttataacatcgagacagctttgtgactttcattcgtgcgccgaagaagaacagcaactacagatgcttcagcaaggctctaccaatcgactacgcccgggtgatagaaagcgtcctcgacctcaaacccctccggaacagccaagtttggaagagagaaaaggggaaagtaaatgtggccgtcgaagcagcgatctttgtccgaattcttcgtctggatattcgaaaggtgagctgggttaattattgaatacatggaacaatccgcgaaggatatatcttgtttgtaagtatatgccctataactaactaatgatctcctagttatgagatagtcatttttgcaataattccaagctttcaatgattctttccccacccctacggatctgctactgagctcctcaaacctagaatatatcgactctcgaggccctgctatattccctttctcgatgtggaccagaagacatactaagctcctcaaaagtcaatgtaagttacaatctaccctgagaaccaaaatagtctcgcaagtactcaccattttccctaaagcagaatacaagattataagagcaagacataaacactcccccacatctcggcccgtggtggggacctttgcgccagccaaaccatgtcatctctctagatacgcgggatcaagtttgtttaaggcgcattctcaagagcctcatttccttttgaaaaggagatgaatggatatacagttctctattgaaaagcttgcggcaagtttcaccagaatgagatggatgtgtttattttacaacttcaaactgcaattccgcaattccggtcgcatatgctaacgacggaatgatgacggactttacgactagtccatgcagtccacgcatccgcccaacaaataaagcaatgatctccatcgaaggaaaggatacttaagacgctgtggtgctcattctcgatagtgaggaaacaatcacgatgggaccgccgacctcgaaagtagccctcgtcactggtgccaacggcatcagtgggttttccgtcatagagcatcttgttcgccagtcaaaagaagaatggtttgtatcaattccgatacgcggtctgtatttattcactggatctcacggttccttaggtccaagattgtcgtcacttccagacgccccctgcccaatgcctggatcgacccccgagtagaattcctggctattgattttctagacccagtggaggatatcatagccaagatgaaggacatctgtgctaatgtcactcacgcattcttcacctcctacgtccacagtgacgatttcaaattgcttcgcgaaaagaacgtcccgttgtttcgtaatttcctcgatgcaactatctcatcctgcaataagctccaaaatgtttcgcttcaaaccggaggcaaggtaagcacagcccctttgttgttttatccgactgtggttggctaatcgaaattaaatagtattatggtgtgcatcttgggcctgtgaaggtccccttggaagagtctttcccgcgatacgatgaccagggatacaatttctactataaccaagaggactatctcaaggaacttcaagcgcgtgataggacctggtcctacagcatcatcagaccaaatgccattaacggttatgctccaaatggtgagctcaccccagactgttctaggaaattctaacaccatatcagccaatggaatgtcggaagttcttacaatcattatctatatgctcatttgtcgggagctcggccagccagcaaatttccctggaaatgagtatttctggaactcgatcgatgataactcatacgccccaagtgtagcagatctgactgtgttcgctgcctctcacgaaaattgcaagaatgaggctttcaaccatgtgaatggtgatatcttcgtttggaagtatatatggcaagactttgctgcgtatttcggtatcgaggtttgtattcataccctttatcttgatatgtcaatctcctctaactaaaacgatgtaggtcccagagccgaacttcgtcaaagcccgtcgagctgataccctttcaaacgagatcgacatggtggaatgggccaaggacaagcggggtgtctgggagaccgttgtgagaaaatatggtggcaaagttgaaaccttcgattgcggcacttggggattcttcaactgggctagtggcaaatcctggcttacaatttcatccatcaacaaagccagacagtttggctggcagcgaaatgacaggaccttcgacacttggatcgaaacataccgctccttcgaaaatgcaggagctttgccctcgcgtgcggcgttactcagggactagtcatatcttaccgtcccacggctatactagtctatcatcttcagctattgtttatttcgctatagtgccatatcacgtacatacgaccatagggtgtggaaaacagggcttcccgtccgctcagccgtacttaagcnnnnnnnnnnnnnnnnnnnnnnnnnnnnnnnnnnnnnnnnnnnnnnnnnnnnnnnnnnnnnnnnnnnnnnnnnnnnnnnnnnnnnnnnnnnnnnnnnnnnnnnnnnnnnnnnnnnnnnnnnnnnnnnnnnnnnnnnnnnnnnnnnnnnnnnnnnnnnnnnnnnnnnnnnnnnnnnnnnnnnnnnnnnnnnnnnnnnnnnnnnnnnnnnnnnnnnnnnnnnnnnnnnnnnnnnnnnnnnnnnnnnnnnnnnnnnnnnnnnnnnnnnnnnnnnnnnnnnnnnnnnnnnnnnnnnnnnnnnnnnnnnnnnnnnnnnnnnnnnnnnnnnnnnnnnnnnnnnnnnnnnnnnnnnnnnnnnnnnnnnnnnnnnnnnnnnnnnnnnnnnnnnnnnnnnnnnnnnnnnnnnnnnnnnnnnnnnnnnnnnnnnnnnnnnnnnnnnnnnnnnnnnnnnnnnnnnnnnnnnnnnnnnnnnnnnnnnnnnnnnnnnnnnnnnnnnnnnnnnnnnnnnnnnnnnnnnnnnnnnnnnnnnnnnnnnnnnnnnnnnnnnnnnnnnnnnnnnnnnnnnnnnnnnnnnnnnnnnnnnnnnnnnnnnnnnnnnnnnnnnnnnnnnnnnnnnnnnnnnnnnnnnnnnnnnnnnnnnnnnnnnnnnnnnnnnnnnnnnnnnnnnnnnnnnnnnnnnnnnnnnnnnnnnnnnnnnnnnnnnnnnnnnnnnnnnnnnnnnnnnnnnnnnnnnnnnnnnnnnnnnnnnnnnnnnnnnnnnnnnnnnnnnnnnnnnnnnnnnnnnnnnnnnnnnnnnnnnnnnnnnnnnnnnnnnnnnnnnnnnnnnnnnnnnnnnnnnnnnnnnnnnnnnnnnnnnnnnnnnnnnnnnnnnnnnnnnnnnnnnnnnnnnnnnnnnnnnnncgccggtgagttagtagttgggtgggtgaccaccagcgaatcctcactgttgtatgtttttttttttgttttttttttattcggtgtaaatgaaatatagtaataacatatgtttttatggaacactatatgtaataactttttggaaattaagcttgacgagacataaatttgacgtatctatctaacgctatgaccatctaggcgcagaggtcacctgacccaatggtaacaatgagatataagccgtcttaccattccacccacgactatagtctatagctctcagctattatatattcccctacagtgctgtaccaagcacatacgaccatagggtgtggaaaatagggcttcccgtccgctcagccgtactcaagccacacgccggtgagttagtagttgggtgggtgaccaccagcgaatcctcactgttgtatgttttttgtttttatctattcagtatattattcagtatagatagcaatagatgttcatctcaggccaggttgtgggattctgataatagcattcttggaaattaagcttattatgggtaagcctttgtattgaagtagtatctgaaaatcatcgagtcatgtctgtctatcacgatctataaccaactctataattgcttcgcttcgctgcacaatgatcaggcatttcatatcgcctggatgcaaagacataaatacaagtgggaaagaaaggagtcatatcgtcgtggtcaagtcttcacatcgaggccgtacttcctttcagaccatcgctgcatatcaatgccccatttcgtgatagcaagcacaaggaacccacttattagagcaaagaatacacctggatagatggtcagatatgtcttgatcgtgacctcatctagaaatctcacagattgtaaatgtccatcctactccgatagcaccaattaccggctcaacagccgccgatgctgcagcagcaaagatatactgcaccacgtattttgagctgatcacctccgaacgaacatgcggcataacctctgcaaggtagatagtcagttgagaagtaggacaatagttcaaacagatgacactcaccggccgcataagtattcagtccattgaaagtacccagaagccctacgcccgcaaagaaagcggcgataattggcacaaccataccaccaacttcttcctgtaaagtccagccgtagattaatgttgcacctgggaggaccccgaaaagggtgaccagaccactgttcagtcgatcctgagggaggcgttccccgtttcgtttgagaatccatttcttcacggcgtggtcggacaacctgccgccaatgacgctaccgactagaaagcctattcctggggagaggtagaataggccgctgacgagaggagtcgtcaggttgaaacgtggattgaaaattgagcgggctgatgtgagaattgagtattggaatgtagaaagaaggccacatgtgaggcactattacttgttagtcagccactggacaagatacaatttcagtacttcaactggcagatgatacttactgcaagaaagacattggggtatatgaattgacgaaagatgtgtagaggattgaacatgcttataacagtgcaaaacttcggtttgctagagctccggttcttttcttggatactcggcacgaaaagaagagacaagatgagaccgagtaaagtcattgcgaactgcaaccagtagataatgcgccactgagcaaatgtgacgatgataccgccgatacagggtcctaacaaacagttagccaccctcggatgatagagataattaatgatagtacataccaattgcaggcccactgacagacccaaccatgaagcagccgacagccgttccacgcacagtctaaactcccgtcagtaagtagacgacaatcgggcgggggggggggggaaaggaaaaaaaaaacgtaccggttcaaagatatctgcaagaatagtctgcccagcaaccatgaagaaggtaccggtaaaaccccccaaaatgcgcattgcgataaacatgtgcaaattgatggccgcggcggtaccggctgagcatgcgcaaagcacaaggatagctgcattatatgcattgcgacggccgaatagcttagtgataggaccccaaataaaagacgaaaaacccatagcaactagaacgccggcattggtgacattgagaatctccgatgtagttgaaaactcggtagcaatctccggggttgcgggcaatagtgaagtactagagaatgtgacggctagagtcatccagctgacgacaaacaggatcaggcatttgcgccatgttggtatgccatgggcgtttgagggctggggttttagggccaggtcatcttctgattccgattcttgaggagaatccacctgcggggttggtttttgggactcaagatctggtctggattccatgatgattaggcgttgggtggaattagatagtgtttagtcgatgtaaaaggttgattgaagattcctgcatgactaaagtagtgaaattatgtacacagaaaataatccaacagaatggacattttgtatgcgacccttcggcgtgtagaagctgtcgccgaagtctagtttttctcgcgtagcatttttccccgatgtggatctgacagggcgatcggcgtgggatagccgacagtttcattttgcatttgcacttcatccgtcaagtcaaggtccggtgtatatcttcgtttatatgctcggaagatttctgagtcaagagaaaagaaagagggcgacgagaatggtacgagctcgcgcgctggcctgtaaaataaggcgttttgctggccggatcaccaggtcactatagtgggccatggtaatagctaggaagcatctactcatgtaggtgcaaaactacattgcacggagtatacacttcactcggggagtcactattctcttatcctaaccccaaggacccaccagagagtcgaacagataggcgaaatttagagtcgtgcgatgattggaaatagcaatataggagtaatgagtaatcaaacaggaactgtatataacacaggaaatgatagaagcgatgtcccaaaaagagtgcattgtcgtgatgggaatggtccctaaatactctctgaaaagcaaccacggccttcttcctagtagaactctccctgtaaaatctgtctgggctcggatccgctaggattctgccagtagagagacacagtttcccaggcagtctgcccactcccttcggaaatgaggccagcagattccagatcttcgatgaaggtatatatccagaatctgcacccctcccactcttcagtgaacatgtacctatcgtgtccattcaagataatcaattccgtgatagtttgaactgtggcgtaggcctccacagtgaaggtcaaagtcttgatcgcattatttgtcgacgtgtaagacttggaagatatgtctatcttccctcttaatccatcgtcgccatatccaggtgccatgtcgattctgactgagccagtatcgccaaattgcaggaaggcagcccagtggttggttggaggatttccatcttcgtcgccctcgttgtttggattgatgtagccacttatgtggatgtgtgagacttgtgcctggagatcctttgggtttaaataatccgcatcgaagttgtcattcatttctatatagcgtgtaagtaaatttcaatcttttagaagggatagttgttcacctactaaggtgattgtgaatgatgaactagacaccagtaagtagttgcccgtttttcaggtcggcgagagcgcgaagaatggttattcaaatccataagaaaaccacggacatttatatcttagccagttgcaaaactatgatagagaatgtgatcaataccccaggtgccaatgctgtttttaccgtcagcttcggctttggttagtacttgacgagatgtccaatgaatcagctagcacggtgtatagaaactgcactatttgcaaggatagaagaggtccgggtgtcaattaaaagtagactgttcagatgtcatggtattcttagaacttacattacttctacaactctcatctcattgctcaaagaaaccctgcacctcgacatcttcctctccgtaggcctctcttgatacagatgttacgtattccttgaggcaccagttttctttatctgaatcatttttggccggtcatttaaagtcaaactacgccacgagactcatggagcggcccagcccgggacagtggaaggattgctattcgtttacctgtttctaggggtaactaggtagctgcaaaatcgctgcgtccacttctatgattcgagcgaagcctcacttgtctcgtgttcacattcattacgcttaggtgtcctgtatgcgcatgtattgctggcatgctgaatattccaaattaagacaccaacccattttgtaaagttcatgctctattcagcccagccaatccatagcctgtatgaaatgtctacggccattcctattggttcttttatcggctactcctaggatggagaggcttactgagaaggccacgtaggagtccacggccttcatgtcagatagagcgcagcgtgcagaacacacacctatgcactacacacagaatgaaaagattttacagaatgtggttccactaggatagaaggaagattattaaggtctgtatgatccctatccttgctagcttacctccttggatggtggtgttgttgcgtcgctcgcgtcttgtttgctaggccagactgcccatcctgcatatccttctccactaagtacgtatctattgtgagaatatcccactattgccaaggctagcaccacatgaatatacacacttctaaagtttacctgggctattaaatgcccatgtatatttaggaggctaagatgcagggtatctacttggtcctccattctttaataggtggaatcgtcgcccaacagcgaaccgggtgaacttaaacctcatgcgctctaggatgctagcctcacgcccccaatagccggccgctatccaggagaacaggtgccaccgtaaacgtgcgaaaaagccccaatgctggggcattatgaaattttgcatgcccgcgtattcaaaatagatcggatagaacccagcaagatcccaatctaaaatccaaatctcatccgacggactaagaataatattgcgtggtgcgaggtcatgatgcgtgaagacgaagggctctgttgaaagcatttgtccttcgggagtgggaatttcaggttgatctgctgtttgcattgcttttttcatagaggtgaagttgatccaaaaccggaagaagtactccatgtccctagagctgcatcttgcaggtaggccataccgatcttcgagataaaatgaccgacactcgcccgttgctaatgatccggccacgggtgaggtgactgatcggagatgctgaataaagcgacgaagttggaaacccaactttatggtgagaaaccagctcagttgtgtccacgcttcctccagcgtccttcctggaatacggtccataacacagtacgtatcttccccatccctaactatcctcttcagagcgggaactcggatgcctagttggcaagcgatatcggtcgcccttatcatgtcttctgcctcgtgcggccgatagaactttgagagaaagttcgacgaaagtagggatattcctcgggtggatgcaggcgaaggggagctatggatgcgagaaactaactcggtatctgagtagctccgcagtaagtcatcctggaaattcgattttgtatccatgtccattgttagtatgtgactgctccaacgaaagaagatggcctcagctgatacaaaagtcactagggcaatcacgtgacgcgctctctgttgaccaatcatatccagttgactagctatatttgaattactgggcttcatcagaaagtactggagcacgatcaacaattatatttatcaggcaccagatcacgcgtatctcaatataggggcttatcggtgatggatataacagcccgtttgacatgtttaatatgccaccaagctatgggcagattgcagaagacacggattcggtgacaaagaggaatacgactagctgattgggtttaatctatagatcttgatagattttactcaatatacatacatatggattactatcctgacccaacttagttttgacatacaacaattgcttcccctgtaatcaacaaaataatttcgtagcacacgtaaggacttcacgttcacatcatttagaatcattctactgccatatctaaaaggttttctacaatacttttttattctctttttgacccttatgctggccgataagtttggactcttttaggagctcttttgataattcttctaactccttttttaaatattttcctcctattttctggaaggaataccaagagctgccggtaaaaaatatgagccgccgagtgccgtatactccctcttcggctcaagagataaaaacatagtttgatgcattctgacgtgctcgctgttaccctatacagtttataaatcttcactatggcattcctttccctttctctcacttttctggcaggcagcttgccgttcagcttgctacattggcactttctttgtatatttgcagagatgcttcttctggcttctagggggtagaatctagtggctttgtagcatagagcacaatttaccaccattaccgtttactttcgtaacccactctccatatctactttatcaccagggacctctggtatcattttacttttactcctactatgctcttccaatgccgccccatcaagccctgttataaggcacccttatacctcatttgaaactcacatctattaaaagggtttatcaagcacgtatcagcgttccttagctgcatgaaactcggtaggctttgctccccacgcgaaaccagacctcattcaaccgattgaagctgattaatacaggcttactgaatatggctcaacaatggagttctacagctataggctacagtcgaaagaatattatagatcccgtcccagaaattgtcttcactggaaataaagatggagttcaaggccggtttttccaatcagttagacatgtcgttggagcagtgcttcgggtccatggtatagagagctttatggcagtagctagatcttcatattccatccatcatcatattctcacttttggttgatcatttccttctctcgtagtcagtgcctatattatagttattagagaggacgcgatatcatgtaactacaatctctgttatagaatcctacacttccatccgtcacttcccatgtctacaaaacaatgtcggggagcacacaagaactgcatcattccaatacatcagatatcatcaagatgtcctagtgttccatgtacacttctagttggcctagcgcatatcgcgaagaccgacggaggcctatacgaaggaaaaaaatctcaatcttagaagtcaaaccatttgccttatgctcgacaaccagcttggacactgatgcagatggggatcgaaatgatggtctatatccatcaatgcgattcatcccctttttttgatctcttttttggcctctttctaacattctttctagccccagtgcccctccagcaatgcgagggcgaatccctcgtgagtgagctcgtccgacttgtggatgagaagggccttgccttcggcctgaaagtcgtcggcgttgtgactctcgccctggttctaagggagggagtcctcctactatcttggtggctgagatactgtaccgagcggtatatcactcgttcgttgtctaggatatataggaacaacatgctaacctttggttcttcgatgtagtcggcatagaaaagcggatgcagacgacgttcgcgctgccggtcccgatggcactaaggtacaggcggatttcacccaaaattgagccaggaggggtgctgtagtaggggaataagaggaaggggaggggctagtccctcgtataattatgatatgatcattgatggggaggaggggttggcatccattgtatataaccaatccggccaactgtatatatcaacagcggtctaaagctctcataattatcacaaatacccgcatccgtacatgtatcgctgatatagtcatataaacttaagaataaatatgaccaaggagtgcttgatcttattagcttcttcaaataaggcagccataaagaaaagacctaggtattctcttacagacagagagagaggattaagaggaaaccgagatataatgaatacctacttaaagtatcatatcaaagataatagtgagactacaaattgagattagagagctgcagatgctatggtctgaaagacatggacatgataggagacgtgaacacatcccatgagcatgaaagcaaaagcatgacaaagaacgtacccactgtcccctcgtctctcatctgctctctttccattaccggtcatgaagtagaaacctagttgcttgaggggacgggacatccagggactacagcaaagccgattccagtgtcatcagagacctatatgagtagtataaaagctcgttcatgccgcttaatagaactgttgccgcgcgaagttgcagaagtctaatatcaacagaaagcgttttacatatttaagatcagatttagatagtcaaatagcgttacctataggacgatttttcccatttgcattgtacatataacaattttcctttataaaactctctcacacacaacttgatacatacgaccatagggtgtggaaaacagggcttcctgtccactcagccgtacttaagccacatattctgcacggccaatacttaatgtgccctcagtacctaagcggcactctagggtgagtgcgggtgatataggtaagaagtcttgagactggggtaagaaaggtaagaacggggtgacaattctcacccttaaggtaataggggctaactcactctaaacctatatcagtcctaagaaaaatacaaatagtcaagccccgaggcgcttctcttactctaccatgattttctttgaatctctttaccagctaaaatatattctccgaaaataatatcccaaaagcactccaggaacgtctcgcacgtgcgatatcacgtggcttcacacgtgactattaatataagaaggaaaaagagggtaatactatatactaccctgagctagcgcctactacgctagaaaaatataaccgtacagttaacaattaggcactgtaagcttcactcggattttaccgattttagttcctaattattagtagatagaggatttcctataacgagtctacagacccaaattttcctaacctacctattctgactcctgaacttttgaaacttttcgcagagttttatatcaaattatataaaaaggttctatctcagcagtcagcttataatcacttcaccagctttatattgaagtaggagcgagaaacttctcgatcccttcctaaggaagttaaggacgatattcttaatataagaggtaataattatcctttaggactcgctactaataaaaataaaagtatattagaaccgaactcacagtagaatataagctccctacaaagcccagagagcggttcctagtcaacgggaaggacatagcctacctacttcgatacctatttatagataactgtcacaattatatatatgagagagcacgtatatagaccgtaagttctctctctttatttactggcttaggtataagagcaggggctgttatcgaatcaagtacttattataaattaaatgaatgcttatattatagggtttgtatcttaacgattacaattcctgattatattaaaactgactgataattatcagtaccttttattttatcttaagtagagtaaggaaagggggtctctaatacgttaggtaataattaatcctaaattcttaaaaggctagtgttatcgcgatgatactaccttataagtttacgagctataatcattctatctagaaatagctgatataatagaattagaccaaaaaattggtttagggagtatctagtacttaggataagttttattttctaggtaattgtctataggatagcggatggtgcctttaaagggcttgccactgtaactaaggttcttaccgcaaaactacctaatagaagagagttatagaccttagaatagaatgaaactataaaggatttgctattctttagaagggttactgcttaaagacccgacctaacgaaggcgttaaccttctccttattgtagtacaactttactaccttagcccagcgggataggtttaaagaccagttacgcgtatatagaattcgaggaggcattgtaaataagatcgactataagtatatttgtaccgttatacctcaattttactaaggaatttcagctaaggcttcttaggctacttatagccaggctcttaattactagaattataatacctatctaaaatattagtcttctcttaaggtattagatatataagccttattctatgatttagaccctaactacgaatactacgatatagaataaagcatatcttattactgagacttaaacgtgccgctaaaacttaatatagctataaccatataatttaaatctaataataaaattattaagatcaattagagaattacctacttaacacaggagattactagaagactagaagagaatagggaccttatatttaaacaggattgtctctataataagaaagtaaagagattgcttgcctagaagaaagactttattaaaaactagtaggatactttatatactaagtatatatctaggaacaacttttctaaatataatctaacgcctcttttcgatatctataagaaatatctactagagcgctcctatcttagtaagaatttattaaagaaagtaactctagatagtaaacttagtcgatagtacctagaagatatagtcactatttatatatcgatagaatatactatttactaccctagtatagcccctaaggaaggccgttatctaatatataataagtctatactagagtaagtatacctaaagagtattatagattaaaaagttaataagaagatagtattctactataagggagagctaagtatatactatagtgtcgaagaaaatccttaaatagtatataataccagtagtgctataagaacgaaaagtatgcctatcgacgcgtatagcgcagctttatttaattttattatctttatactaaactcttccttaacgaagattcctaggagaattattgcaaatactatcttaataaccttaacccctaatatagtcttttgactttccgctccatacttattacactaggattctgtccattctgcctaggcgataaaagtaagaaactagacgagagatttcaataataggttataaaatcaactcttttaaatcatattaacgaatacttagggtcagcggactctttagccgcagtcttctgccctcatctgtgttacgaaggaaggaagtatattgataacttatatctccagtggcacttctttgatatatattccatagaagagccccggtcaaattgtgttaaacgaaaaagaaagtggcagcttcagtcagagcctgcaggaactacttttgggaatttgagtgatgaaacattgccgagtttagaggattattttctcaccagcactctgccaaccagttttgaggattcggatatgacctccgcagatgatttatttatggaatttgtacgcttggatgacgactagggcagagcattgaccagggttatatcgttgataatgactattacaagaaacgaaggtgcttggtgttgcactaatcgtcattcctcgctatttattacacgattaaacgatgctagattgacggcatatttgttggtcagagatttagtgttgatacttatttctttcttcacatactttccttaacaattttaatgggtccgtggtcaacaatgagagtgattgtactttaccttaagaattacggcatatagtacccctgactttgcagcacttccggaaattggtgtcaccacgtacacacttcgatagattctcgaaccctagtgccaagataactagtctgttctattgcgtttgacaatcgcatagggagagggcaacaacacgttccagcttgctcgaggatctcaactggggtatttttccgtataaatgcgcgatcaccatgcgatctggatgggcatctagggggatgtccgtataaaaaccacagcgtatagaccatcagcacctgacgacacccttagatgtacatcccctcggcatggctctataagtatgcatttcacaggctcattcaccgtttctaggcaggcccttagtgatatgtgaagtacaggcctaagtgctaaatctcgctctaatcctatctagcattttgcgagtaaagtaattgcccgggcatcacctaattaccagatcgacagtctacaccaatcaagcgcatccacttgcactatatcatcagatcgacggctacaccaatcaagcgcatccacttgcaaaacctggttttataaaacgaggtcactaggctcgactgctataacatttatggagaagcaaaaagtaagggaagtctctttcgtattcacgctagtgatatggaaaacccggtaggcaaaaccatatccaaagagatctatatactattgatcttttctctgcacactatagggtcgggtaacgcggttctatctgagtaggaaaagaaagtgagagtaatcgttcaatccaagagcgggaggatgagctatatcataaatgatattcagagggacaaggccatttgcatagtcacccgataatcatcttatccggagttagtgcagctagatatttcgcttgatgatgctgaagtggatgatggagacgatgccgatatcgaaggtgtagattccgatgaagatgatgattccgatgccgataaagacgattccgatgaagatgccgatgaagacggtgaagacaggtcggaagcaatacacgagctgccaaccttaaatccgttgtccaatgtacaccctgtctcgtctccattttggttatagaatttaaccatcccattttcgtttatatctatccatgcaacaggcatgatgttgtctttcgtgctgccgcatacgcccacatcgagcttggagtagtccttacggataccatgtgtaatcatgcttagatctagggtttcgtcagtactaatagtatatcggtggaaccattacgcaccagaacaatcgtctccatcaaggagaccaaaagatgatgaatgtcccgtgcagccatagttatcatcagaccatatcacgcattggcgatcataatcgataaccgtgagactgccacctaaggcggcgcgtatgtagacgctagcgagaagtaggaagatagagaaggtcatgtttcgaatatttataaggattgaaggatgatagacggattggtatctccagccttaagctattgtgaaaagtgacgaatttgtacggcatatctgcgaatttaaatgtccacacgtctcctgatacactgtgataaaccgtggcaatacgcgcgcaacacttgcgacacactttgcgacacgctttgcgacacgctttgcgacacgctttgcgacacgctttgcgacacgctttgcgacacgctttacgacacgctttacgacacgctttgcgacatgctttgcgacacactttttgaatcgaggtcccactaattcctgacttaatcttagctcctaagccagcttgcgtccctacccctgatacgtagctttgtctagacagatatgtggggtcttgacacggaccatcatctacctgtctgtggcggcatggtgctcaggtggattggggttactgctctaggagtcgcactataaactcaagtattggcgctgtcctataaattgctcgtacagtttgatgattttttagtctacagcctgatttagacatatgaaggcaggtattcttctgcattaatcttagatcacgtatcccaaagtccgttaggcttgaacgtaagttttgataatatctagcaaatactatacatgctaacatcgcctagaatgaagggaactgtcacctggttttgcgtgtcttgtcatgatattgattcccatcgcatgaagatcaaattcacaggaaacgagcctggatcctattttgtttgcgtttggtcgtatttactccctgctaagcggcgcatcaacatcaatacactatgcacaaattgcttagaggaaaccaaccttctgtcatcgaaggatcagcgagagttcatctacaagaagaaggatcaaatcatatttgaaagacgtgttgtttgggcaaagcaggagtgggacctttgggttacttctcgcgaatgccaacgcatcaacgaatctgtgcaacataatgggggcttgtgtgttcatctatttggtggtgttggtatatattagtctcatttcgagttctcaaggcggggcggatcagaaaatccgactaagggcaagattgtcagatattaggttataggaggaattggcataagaacactgtcatgagtctaagttctgtacagtacgtcccgaaaccggtgcaaccacctcactctccgcctaagggcaagattgtaagatattaggttataggaggagttggcataagaacactgttataagtctaagttctgtacagtgtgtgtttttcatttaccctgacccctcgcaaattgaaagcgatatgcaggatgttctgtacagtggaattcgaaatcagatttaactttgcactcttacgatatcattcccggacccgtagggacacactaatctaattttagctctacccctggtagagctgtatcgtactggagacgcgcgctgcgcacgctgtggccctgaaacgatttatagggaaaggccggaacaagaagtgaagtcatatttgtgttgctcgactggtacttggaattaagtgacattgacgaatcaggacgtagaaaaatttgactaatagccgcaaaatcttgaataaccatgaatcaggtgtcgtatttcgattgtgcaagtatatcggcatatgatgtcttacgtggtcgttgggaacgcctctccggaactggggtggtagtccgcgacgaggctttgatttcttcgggcgtgtctggccatgtaatttgcgcgtcttcctcatcgtcgtcaccaggcgcaattatttgagtgggatcctgggactggtacgtgataggaagggactcggtctgtggccttgcagccgatttggtgggcgtttgtgggccggctctttgagaccaacggtccacgcgcttccgtttaccagtagcgggaggagtagcgggcaactggtgattttgtgttgggagaaaatgtatatcatccgtaacgatagctaactggcgatgctcttttgtgaggccgaaaacacgaccggtcaagaaaacatgggtgttcatactcaagggtggaaagttggcccaacgctgaccatttttaaagtaagcggtgatgggaaaggtgtgattggttcgggttgaactattgtaaacagtagtctgcagacggtagtgaagaagagtgggcccgccgttagttggccaccgcgctcaataacgacaccgagaaatgtcactattggctgggcagcctcgggacagtacatgaaatacgattcgatatcttcttcattccccggatgactagattgcgtaagcttggtactgtagcagatgggacaaactgaccggtccagattgtgggcgtggaggagatatgaaattcctcgtcatcagatgaagtagtcaggaatgaaccggaggaatagacgaaagtgtttggtttgtaaaggtcggactggttgccctcattgaaaaatctgaccaaggtgagaattttatcctgcttaacatcgtctgactggatatctttccatggtagattgagcgaaacacggagttgcatggaaagccctttgccgggacgtgtaggatccggttcgacatgctcgacaaagtcccgaatatggataatagcgggaaaagttgaattggaaggcataatgttctcaggcgtatatcagacctaaagaggtggaggtgaagtatgtctgatcagtggggtttctagcgaaggctcgggagtgactgtgtgatgagaggagaagtgagtaagagagagacgtgattttgtgtttagggttattatggcgcataatccctgttgtaaacacgggcacgtatatgatatatcctagatatatctcaccactggtttgataagaatcttagtggatgaatttaggatttaggtttttgcaagccatcatttatgtatgtaagacgtgagaatgcaactcgttatgactcaacaaggttgataagagaattggtctatactattaacacgcagcgagtttcgaaaacagcttagacctcaaggcaactcactatttgtttatcggcgtgtactcggaactgtactatgatcaactacgacgtaattaataaatatatagtaatagataattcctttaattccagaccgaccgcatctttattatccggatccaacttcaacctgcatcctcgtatggacagaccgaagctgggattaattagtgatatgatacatggcgaatgtagggaacagaccatcaaagatatctggttacagcatgcgtactatcgaaatatccatattcaatagaagtgcgaatactagcgtgaacattgttttgtaattgacattgacttctcggttttcatactaagtaaagcaaccgacggccatcccccgcacaacggctgttcgccaagcacccttgacaaactgttgagcagtggttcacagctacattaggcgatcttctcagttgtgttcaagtagaagactggagttcgatgatgagcctctcgatgcgttgacgaatttcgtgacggatagtccgtacagcatctaacccttgcccggcggggtcattgagttgccaatcgaggtagcgtttgccagcgaagaaggggcagacatcgccacagcccatggtaatgaccacatcgctgtcttggactgcatcggcagtgagaatcttgggtttttggttgctgaggtcgatgccctcttcgcgcatagcttcgacaacgactggattgatggagtcggctggggccgatccggcagagcggacttcaatggtgtcaccagccagatgcatgagatagccggcggccatttgggagcgaccagcgttgtgaacgcagacgaacaatacactaggcttagccatgatgtgcctttgggatcgattgggcggtcgttgtggaacagctcgttggaagagcgactcggttgttaaagtagtccgcaattgactggtacaggtggcaaacgtctcttcaggtaattatgaaacgagaaaagcttcataagcggtgtctcaattcccgtataagtaatgtgcgagagactgaatggaggcagcgcgtggggtttatataacaagtaacagcttgtgagagagggaactcaacaatccgttgatctagaacattctctatctagcagaaaaaggcagacttgtgtaatatctcattcactagcggctgttgccccacagtttatcaaagcgttgattgagaatctgtgatatagtcacagtatgtgcaatgtcacatcctgccggcattgccggattagaaatcaatacctggccatagcctcagatcctgagcactaagtgcaatttagactggcagcaagcaggccttattctattacgtgacgagaggacactgctatcgaatcctattccaacacgggcgaagttctgtaccagccatagacatgtcactcgaacaatatgactggtcaaagtttgtaagaaacacagagactgcattctatccaaaatgcgtgcggaacatcgaacaagttcgagcctcgaaatcttacatgccaatgacaaagcaagagtcgccaagaacttttgctgtatgtcactcccttgtgctgattggctaagcgtaataaagtgtcactcgtctagtttgattggccaccaaaatgccctttccgagttaatttggattagtgtcgcccttcaaggcaagaaatcaaaatctatatatattgcagacgactctagctaacaagggtttgtgcaaatcactagcgtacgttttgattttccttcgaaatatccattgaggacaatactttcgcagattccaagccatcatatcttattcggagctggatatggcagccccaacaggtctgcacccgacgaaggaatcggaatatcataactcaatactgcatagccagccgccaactcctactgctgaggatgtcgaaaagcaagaatcggaagagtctacagccaagcaatcagccttcaaaggtcttggctggttagatcgttttctcgccttgtggatcttccttgccatggccgtcggaattatcctaggcaactttgttgaaaacacgggtcctgctctccaaaaagggaaattcgtgggggtttccatcccaatcggtatgtgcgcgtgaactgtgaatttacaaggccttggctaaccggtgcaagcaattggtctcttggtcatgatgtatcctattctttgcaaagtacgatacgaatctttgcaccatgtattccgagagcgtggggtctggattcaaattgggttcagcatcttcatcaattggattattgcccctttactgatggtgagactaatcccactcctcatggtgatgtgtactgatatgatccagcttgcactagcatgggctttcctaccggacgagccagaacttcgggaggggttgattctcgttggattagccagatgcatcgctatggtaagttacccctttctttgtttatgttgtaccggattcagagactaattgatcatgataataggttcttatctggaccggtctcgctggcggtgataatgaatattgcgctattcttgttgcagtaaattcactgctccagatggtgctcttcgctcccttggcaatcctcttcattaaggtcattggccactcgggcagtcaagttacactctcatattctaccgctgccaaaagcgtggcggtgttccttggcattccattaggtgccgcaatcattacccgcattgtacttcgaaagataactagcccacgttggtacgaccaggttttcctgaagtgggctggcccgtggtcccttattgggcttctttttacgatccttgtgttgttcgcatctcagggccgccaggtggttcatcagattgtatcggtcgttcgagttgccgctccgctcatcgtttattttatcgtcgtcttcttcatcactcttcttgtgacttacaagctcgggttcggttacaagttgtctgctactcaaagtttcactgctgccagcaataatttcgagcttgctattgctgtcgctgtcgcaacatttggtgccaacagcaatcaggcgcttgccgccactgtcgggccattgattgaggttccagtactgcttggccttgtctatgttgccaaattcatagctaagcgagctggctggaaagactgaatcgaaaaataagaggaaatttgcgacttaggctaggctatgttgaagcgaggggaccgatctcgaggcgtacagataggcaatgaacttaacagtaatagaaataatcataatttagtggtcaaaatttgtctagatcaggctgaacatacgccatacgacttcccgggtgataagcccgatctgtagtttgaagtgtcaatggatctctaggtgacttctgagttaagataattatgagactccgttgtttaacgcgtggatagcgtacatactgaggccgaccgtactatagccgataataggagtatccctttagaagatgtaccctttcgtaagtaaaaagggaggtatttgattgggaagagagggggaggggggcggaattctaaggcaaacccccatccaataaagttcattgagtgaccaccggaacacactattcccccgcagaaatttggtggcggtctacatcctagctcaaagcattgcttattaaacaaaatatggagaagctcccgaatcagcacagcccagccgagccgagtcttttatgtcacaactacaaggtaactggttacctcaatatgtctaagtcggtcccccgaagacatttccaaatcgtctgtagtccagtccctagagctcgagaaattaagtttgcctaaagcttttgtgtctgttagattcatctgtccctttcctcccccctttttttcaccaggccacaaaagactcttgatatccatcatccatcgatcgtctggcctgattaattaggtattatgtgctttaggtggatacaacaccaatttcaaagttgaaaccccggtacatctgagctattcagctattaacaagagcacgaagatcttttccagcatgagcccctggttatcgttgttggcattaacacaacccgctgctgtagatgattgttcttcagccactaataccattactaaaacgacatcttctgttccgaacccgttattgccatgctcatgctatatttctattcttatgtcggacaacattcagcgcagaagtcaagacgacgtccactcaccaaatggacctctagtgcatcggttgtactcaaaactgaacctttcgcagccggggcgacggtggcatcccagatctgatgtcaagttgctgcctgcgaagtacgaattgactgaaccgtctgatttggtggtgcttatctcgagcatgctcaagaaattgattcagataaacgacaaaatgtcactgggccagggtcaacaaactaggtttcactctcgtactgcgccccaagtttccgtgtacaattaccttcagcggttggctacgcacgccaaactcccgtctgcgatacttctcagcatggtctattacatggatcggctctgcatgttatatcctgctttcacggtttccagtctgacgattcatcgattcctagttgtcagtgcaacagtcgccagcaaaggcctgagcgacagcttttggaccaacaagacatacgctcgaataggcggaatcagcacgatggaactgggcatgctagagcttgaatttttgttcaggatggaatggaaaattgttccaaagccagaggtgctggttgactactaccggtatctcgtcgatcggtgtgagagcttcaagatcgatgatccgagttccgactctagcaccgcgtcagtgttgagataatccacccacgtgatatcggcaggggaggggataagttctgttcctaagagatttattcttaaataagggccattaaagagtcggccgcggctgggtcacaataccagcatggatggaggattacaccgcgtctggttggctacagcaatttttttgctttggttaaggttactcgtcgtaggagataatgagatagaaggctaaagtacgacatttgaaaagcatagtttcacagtaagggactatacagttctttactctatcgtccactattcacaaactgtcttaaatcataactgcctgagaatccctcttcgaatttttcaatcttttcccgcctggttcgctgaaatgatcagcaagaaaattagatgtgggcccgcaccaatattgtatatttaacaaagtcctcgaaacagtcaacggttgccaataggcatgagccgctcatccggattgaccttcatccggaatgggtgtacgactccgtaattgagaatgatttgtgatggtaacatacgcatccagccaccgaggatactaaagcagttaacagccttaaacaattgtgatccaccacacatctggggcaatggcgagcattcggccttgagttggacaagcgcttgcagtgcttaaaggaatccaattaatgcatcgctatggtaaggtacccctttctatgctgtcggactaattattcatgatgatagatcgtattgtctagctttactgcatctgccagagattcatgtctatcacctatccaatatgtcgaaaatggacatatttttcaccatgcaatttggttctgaatcacatccaagttcggatcggacatcacgaaggtctgaatgatttcgtatactttcgataaggcttgctgcagccacgcacgatgtaaattgacctgtatcctgaacaccgccaaagtgctctgattcagggacagtttcgcctatgacagaaacgagctcgactgctcgccctgcacttgattcttggatattggaggcatctatgctggtcattgcatctgatctagacggtgaagacctcatctcaagagtcttaagcggatgcgatgagttgttcaccttcaaaggagttgccaatgaatgatggtgatccacggaagtttggccgtgggccgtcggcaagtgcaattttgctgatggtagggagaccactggtggaaactgagaacggatagagcttgctgtttgtctttgagattccaagtattcttcgatttgtgtttcggtgacaccatggatcagcagcagggatcggagagaaacgttttctgctgcgacttttcttcctgctttttgaacctcctgtgtcgccgctacgccaagcctttcatatgaccttaattgttgctcaagttgttgggtgtattccttgcgccgtgtgcgagaacgccgttgattttcgcggattcgagcggatgatacatcacacttctccatattgacagctttctttcccttcatccctgtgctcgtaaatgggaatgcaagtggtgaaggtacagatttgggggtataggggaactcttagaagtctgaagatatggtcaagctgaaacggaactcagtggcgacttttagtcattcttctaactagcctaaccctgaaaataactatccagcccgggtggggcaaaaaacatattatccgggaatctatttttaatattattgtccaatcacatttagttaatgacatacttcctccctttggggaagttttactatacaactgcacgtataggcaactttctgactgtcttgcctttttgttacctttgccacctaccttcgcgagtgtaacctatgctatcttactttatacaaagagcgccatcgacttttaggccggcaattccatcatccctgctgcaccctacatattcagcaaggatatcttccgctgttcctcaacaagtgattgcgaacacccgccaaatcgatgtctcatatcgaactctagagttacgtccaagtgaagatagccgagatatccgccagaagtatcggccattcatccttagcgacgatgcaactgaagactgggtcaataacttagacttgactactgcaatggacatggctgaacttgacctgcagcttacaaacaagaggctgagggttctggtactttatggcagtcttcggagaaggtcatattcgcggctagtggcactggaagcttgccgtatccttttccggctcggctgtgatgtgcgtatctttgatcctgaaggtcttccggtaaagaacgacaacgataccgatcatcctaaagtacaggagctccgagagcttagtgtgtggagtgatagacatgtctgggtctcgcctgagcaacacggaaacttagtgagtgacctttcgcgagtgttctaatactcagtgcagtaattactgactcgttctatccccagaccgctgtattcaagaaccagatcgactggattcctttgacgactggaagtgtccgtcctacccaaggccgaacgctggccattgcccaagtgtgcggtggatcccaatcgtttaatgccgttaactctttgcgtatcctgggtcggtggatgcgcatgtttaccattccaaatcagtcctcgatccccagggcatatacgcaatttccggatgaaggtcaaccagaagatcaacgactcatgcctagtggcaaccgagatcgtctcgtggattgcatggaggaattcgtcaaatacacgattctgatgcggcctcatatcggtcttttcggtgatcgctttagcgaacgggaggagaagaaagcaaaggaggaaaagatgaatgctgctgcagccagataagagatatagagcattatagacaatgcctgggagacaatatcttataaaacgattcttcagcatagtgaagtagagttggcccgtcgtttaggtgaccaccccgctcaagaacgacgccgaggaaagtaactattggctgggcagctctgggacagtgcataaagtatgaggctgtatcttcctgattaccagggtgactagactatataagcatgtaactggaatagagaaggcaatgccgatccaaattgtgagcgtgaagaacaatatgaaacctttcatcctcagacgaggttgtaatacaaaagcatttggttgataaagatcaggccggttgccctcattaaagaacctaaataaggctggtaatttcattctgttcaacatcgtctgaatgaacatcctggcttggtatattgggtgaaacacgtagttgtatggaaagccctttaccggggcgtgttggatccggttaacattattgaggacgtgaagaatggcgggaaaggatttatttgatggcatatcgaaagtagatatatacagaatagtgtgggctccaattatctagggggataaaaagaaacgaataaagtagacatagttgtggtgaagcatatcaggcgcagatacgagcgaaaatgtgatgagtctaaacttcctgaccgcttcttcgagaggttattacgacatataggacaggagtctactcatacaaatgcatgtaagacgtggaaaaagatgattggatatttggccacttagttttaagaatttgtctgccacgtaccaagagtagggacgcattggagagtagggacgcactggagagtagggacacaccagagagtagggacgcactggagagtagggacgctctagaaagtagggacgcactggagagtagggacgcactagaaagtagggacacaccagagagtagggacgcactggagagtagggacgcactagagagtagggacgcactggagagtagggacacaccagagagtagggacgcaccagagagtagggacgcactagagagtagggacacaccagagagtagggacgcactggagagtaaggacgcactagagagtagggacacactggagagtggggacacactggagagtagggacgcactggagagtagggacacaccagagagtagggacgcaccagagagtagggacgcactagagagtagggacacaccagagagtagggacgcactggagagtaaggacgcactagagagtagggacacactggagagtggggacacactggagagtagggacgcactggagagtagggacacaccagagagtagggacgcaccagagagtagggacgcactagagagtagggacacaccagagagtagggacgcactggagagtaaggacgcactagagagtagggacacactggagagtggggacacactggagagtagggacgcactggagagtagggacacaccagagagtagggacgcaccagagagtagggacgcactagagagtagggacacaccagagagtagggacgcactggagagtaaggacgcactagagagtagggacacactggagagtggggacacactggagagtagggacgcactggagagtagggacacaccagagagtagggacgcaccagagagtagggacgcactagagagtagggacacaccagagagtagggacgcactggagagtaaggacgcactagagagtagggacacactggagagtggggacacactggagagtagggacgcactggagagtagggacacaccagagagtagggacgcaccagagagtagggacgcactagagagtagggacacaccagagagtagggacgcactggagagtaaggacgcactagagagtagggacacactggagagtggggacacactggagagtagggacgcactggagagtagggacacaccagagagtagggacgcaccagagagtagggacgcactagagagtagggacacaccagagagtagggacgcactggagagtaaggacgcactagagagtagggacacactggagagtggggacacactggagagtagggacgcactggagagtagggacacaccagagagtagggacgcaccagagagtagggtatcagggatgcgcaatcataaagttacagtatcttagatataaagagtataacctcacgggaacccgagagatcgccgagaaaaatgtggagaaactttttaggatatttgaaatcgaaggctgtggtaacctagagcctaagcacagagttaccgcgactattaatcaggaggtcctaagaaaagcacttacaaaatcaaatctcaccctagaagcacttatcgatctaaaaaatcagccaaatctcctattagaaggagaggatatcattacttgtatatataggaaatattgtctaaaagctggcgagagatttggagaaactatgtgactggttgatctttatctaaatagtagggcagtattaaaaaatatcgaatagagactaataacgttatagatatctcgatcgatatactcgcctaattgcgcgaagaatcgatataaagtataagctttactattagcgaaatatatcgtacccttaggttataccaaatttcacaaaaccctacttaagagtagaaatagtgggctagacttggttccaaagactattgtaaacaaatacgatgcttataatataacgattaacggcgttgtattttagacaagttattactatacgttaggctatagaagccactacgatcttcctaaattaccaggatattaggtctaaaatgcctagaggtatatttaataattgtatgcctcgtatatagctaacttcctagatactgaactattatctatatatagtcctaaaaatatagataaaatttcttaaatcttaggataggtggcttatcgactcagattctatgtcctatattaaaggattaatacctagtatcgctatagtagaccgaaaatgtattactaatcttatagatttaaaaaagatatttcctcttcttagaataacttaatatagggaagtccttaagagtcactttctctaaatacctaggagaatattatctcttactacacttatctaagatatactgtttattaagagactagtaagagcgctctattatctctatcctctaaaatttaaataaagcctttgaaaagttatacttatttaatagaatcttatcggaactagaggtctccttaaagtctagataacagaacacgagtttataacgttataataaactgaatacccgttcgttatatctatactatagctttagctttttacttataggtattttgtctactaaggaggctgtataagaaattttcgataacaatttgaatattttactatagatatgagcctgagtaagcttgctatattggcttcgcgattaggctttaagttggactaaattaggtagctttaaagtagaaatttagggtaatatatggtataaggcttttttgaatcacttagtagggaggagttctataaatataaagagcgaaaggtataattgatattaaatagactttagaatatattacagaaccttcctaggtatctggcggaggataatagtatagcctgatttataacaaatgacctagaacttaaagtaagctaccgatttaatagcctagcataagacgagtatctatagtagtgcagaaacattttttataatcaaatctttggtcctaattagccaccgttagaatatataacgtcgctcggtatggtaaaagatattattagattattctttagtaaaagtttattttttcagctaattttggatgaatgataagctacccctatctaaagtcctataaggcttactgagactgtgctaggatctatcgatactaatatggattttaaagagtggcatctataagttcaacctataaatctatcgccttcggaagtaccctaacccttaataaactctggactagagttggtagaggaagatactagtaagctaatagagttggctaatcacctaagtggaactcctgattgtgatactctaccgttagcagctggtttcgaggaaacgtcttaactaatagaaacgaaaaactacctatccgttcgaaataaggtacctgagatccttttaacgtggtatcgattatattaagaagtgatcgttttatacctattcgaatcacaagtctattacaaattcttcttgggtggtggatttaacctacgagcagtcttacaagatctggtaagtgatcatctctttatagtgattaatgagtatagaataggcactctggatatgaataaggtatataaagcagctttgaaagaacggttgatacttatcgggaaaatagataatccaagttatggaaatgacatggaagggacgattttattggataaactccgtgattacgttctagactatgatgttcatataggaaagagaaaggcagattctacagacaatcgatcgagaaagcgtcatcaggacacggtacctgataaggagttataaggaataaaactgttttcttgttcttcaatcaatttttcatctcatggaggatattactccctccgccacttatctgcactgttacacccccttttagtctaataatgagcttcactcttatctgaaggattacgcctctaagcagacagcggcagtagttgacgacaccatagtggcgtactacgtagcacacctagtgggtactgcgacggatgctttacccccagatttgcctataataaattccgaagtacagaatatagacccctttatgctgtggatgatcctcctggtgaacaatgtaggacacaaaaatagcaccacaaatatttttttggctttctatcacttcaattgtagtcccgacggacgaagttctatttcgtttgcacatttggtagccccgacaggtagagatttgcgaacgtagtaattaatattcttctcagctcctcatattcctaatagctaatttgttggggtgtattatatccaacacatcccatcaaggtgaacgtcattgacacgtttgccaatgcggattcctaaaggaaatgcctggtggtaatgacgctttaaactccaacatccccctgggtttgccagatgaagaaactcttcctttcgatctattattatgcattcacgtcttcagtttaaatgatactgacctttagtagatcctctgcggaactagaagtattcgccttctcgacaaacgactgcgccaacttagaaagagacggcatacccaggccttgcttagggtcgcctacatgagttggtcggtcacttaatgaagtcacgatagacccaatagcctcgatgtcttctttgatgccgtcgcgcgatcttctcttcattaaacactcccctatatttgctgtctaatggtcagagttggtcatcatattcatcaagtcccatacctatcttgacttcgcctttcgatatgagaagtatattgctacaatccaacaagggacaagaggtcttcaactcgtagtggataaaaataacccctctaaggatctccttgcagatagttgctatatctgcttcactgaagcgaacattcgttgctacacaaccaaggctaatagccaaatgatgatattcgtatacgatgtagaacttccctccagattgaaagccttctatcaaacacaccaagttttggtgcatgacagattgaagtcgtctaaaagcgtgggtgttttgaatgctacactgcttaagaaagcaggtaggtaggttctcagtgtctttgagccctatcacgcctgggcctgcctggtcaatgttgtaagatagatggtactgtgccggtgattccactttaacagttgatgagctgttgatattttcagttggaatgatagggaccccaagtcgatacgcataattattttggaccaatttctcattgggtttctcgatttcggtactttccttgacgatacttccattgtcgggccacagtttctcaggaaattgagtttcgcgcttctcccgattcaaattggatgccattctgaactggttgtgaaagtggaaatataatattaacactttacatccgaagtgctgtccttgtttatatatttaaggattatatttcgatgactaatactcgccttgggcaccctgcattcgcggatatattttcagtgtcgcagggtggagatttagtaaatactttaaagttacgatcggctaaattgcccgcatatctccagcatttattgatgtgttaggcaccggacgtgcagctaaatatggttgaaggtagctggtcggtaaattttctcgatgtaagtgattttatacaaatctagtattttagctgagagactaaattgaagaacactcttttctattccaccgtatttaagtacttagattttggccaacaaagtaactatatattcatgggaattccttctctgcgctttcgcaatgcctaatattgtacattaccctgttctctagcgtctttacattcgtttcgttttctcacagcctaaggaaggcgcgtaagcttccagtttgaccccaaggctggaactcaggttcgaatagctcaacattcttatctacgcgtgacctaaccaagttcctgatatcataccgagtttgtgtttatatatatactggtttgagataagagggcgtttcataatgaagggagagaataaggcttacctaggataatcattttccctatttgatttcctatctctatatcaagctgctcttcctagctaacgcgtccactgtgtatatcgataagcctattcttaccaatatgctgaattttattttctaagtgagtatatagtagatcgtaaattgagatataaagtatctgcttagtgtaagtagatagtattgctaatatagaaatgggtacaaatgtatccattatcttacctaataagggtctagagtaggtctcgtatactcttataattactaaccctatctaactgctagataagcgagattacctatatatatacttaagcctttttatagctatcgagaagctccttaatatatagtaattgagccgcaatgccgataccggtagtaattataaaagtatatctatagttaccgatattataatttaatctctaactaacagataatagactaaaagggctattaatctaggccctatattctctgtttagcttaatataatcgaagagtctctttataaaactagaacgaggacgaagtaagattaagattaaaaccacctagctattaatattattttcctactagctgatagtaaaagggtgtgattaaaaaatataaaagattcctatagaaggaactcctaggttaatatattgactagcgcgtacgacctacagtctaggtaataatagtattattcgagtaatattacctatatagggttgtagatttatttatatatagctttttcctatcactatattgcgatagataatatgaattagctgtaaaacccctataataacgaaggtatatataaatactagtaggaatacctaaaaattccctttagccgaccggatatactactatactctatagattatcgttactatatatctaatataggtaataaggaatacttcgtaaacccttttctttactaatagtaatactactaaagctaaaaatatactagcggccttactaattttagtatctatttaaactttaggagctctaggaaaacttactaggagaccgtagaattatatcttatttacctaagatattgcccttaattaagtaacgattataatataagttagagctttaactagagctactagcgcaaataatcgataaaggaatctataggaatagaaggaaattctaagaagataagcgctaaacttataactactacctaaaaacattggaaataagttaataagtaagagcttcgctgccctcttactagtatcttaaacggaatggacccgtataatattgtagacactagtgctggtaaaataaagaactattaatattaaatgggttcttgatgtacgtctaagaccggcgaagtgctagtaggattgggtataaattatatggtgtaatagaaacggtcgaatataagaagataagaaaggagaggttgataagaatgagaatgtatataatgtaagacggtataatataaatgagagagttataagaccgaggactacgctgtagattgcctctggtattgttagaaaacgagtgatggtaaaataagttatttcagtgaaaagtccagaaatttatttatctactttggcatgtactagggttggatttataggtctttatcttcctatttgcttctttcctggcggtacttaagaatcataatacagcgggccttagccagttatgattggtagaaaatcaagtgtataatcaaatccctgtacccctaagttgtaatggtgctagcttgggctagttcctgtcttagctttttgtggggcgagaagtggagaaagtccgcgacgctacttttgtgtccgcgattctactttcgtgcccgcgactctactttcgtgtctgcgactctactcttgtgtctgcggctctacttttgtgtctgcggctgtacttttgtttccgcgaccctacttgcgtctgtgtaattctgccgttttcgagcgcctagagctttagcctacttcttaaggatgaacgtgaaattaaccttaccatagtactcactagcccattcctactgtggcttcggaaatcatcgataactctggacaaaatgtaattcgcttataccctaggcaaatggcctatgtctgctggagagctattataataaagataaagtaggccagcatgccctctttgccatcggtgggagaaaaaaaaagccttagctaatcttactatggtgaagatgtcttaacctaatgggttaaatagttccttcctaatagctaccgctgagaatgatcctagctgcgaattggaaagtctcagctataataggtatattcctaagatataagtttttctatcatactttctactaagatcttgatgttaaaatcctatctaggtatggtttaccctaccttgggcatccttcctaaaagtattctttgaattggaagattaatcaggctggttatagatggctaagccttagtaactactttgggtactcaaccgtcttgattaaaagaagagatgccggtagatagggcgctagcttctctaaactgtaagttatattatatgaaaatgtagtgggcctagtggaggctttctatgatggtatatctacttactttatttataattactatggtttcgctgttaatcttatataagtcggcttaactcctactttagaattaagtgagaaagatctggcgagtatctatagaagtgttcttaggggccttaaatatatctatgagtagctctatatagtctacgggggcgtcaactatgataatattatcctatgctccgatagagctattaagataggtaagttatatataatattatcctttatagatagaatactaagcctactagtaaatattggggatagtatgattaatgatggtcctatgtctatggatcttgatcgtgaaaatattggcttactattactttaattaggtgatttatatagatatatgaaaaatcctgaaaaaatccctggaaaagctgcctataggctgttgaagtatacagctcactttatagagtatattggcttatcattatatttatatatatttgaggttcggctactatttaatatcatttagtctcacactaataacatatagcatacattcttttagcaagtggaatcagacagtcggacttagtatcttatacctcattatctggatacaatcatatactgggggtttatgacacaagaaacggagacctgagcgagactatggttctctttctaattcatcacttgcagccaaggcagaaaattgtaggactctcgttgttaccaagctttttgctattagttgaatacagtttgtactagagaatttgatgccatgccttatcctttacacattcctagccgttacccctgggataacataatatagaggaagattaactcttagacatagaggggttgtttgttgcgaaacatcagattatattcttatttcaatctctctagtttaccaaatttataaataaatagtaaaatgagggagtaggcaacggataggctaaaggtaatcacagtcaaaagcactatgatagaccaatcgccattataagtagtatataggctgataattgtagcgagaaagccagctaaggtattaagaagcgtaggactagtataattagggaagttcttatataatgaatagataatacttatataaagattcgattggtaagctaaatataattcccccgatattcctagaatagccagcttataatagccaagcctgatataaacagtatatatactgttgcgagaaggggaggattctgaatagtatttaaaatccactcccctactttattatcagtgaggctattatagatggtatcggacttttggagagatgtgaacgttctaggtattataagatatctagtaagaagtatccagtgtactgtactagtaagaacgttgtcttgctaggaaattccgtccgcttctatgattatccgcatgtaactggattcgaagggctcgtaagtcgaaccaatgacttgagtatccggatgactaggggactgagtcgccatgttcgtatttgtaagctagataggctgtaaaatggagggtagcctttggtccttaagaaaacctgcgacatctaaaacagctcgcaagagattatgtcaactggagcttgacttattttcacaaaagcaaagtataatctgacgcaaagggtacgcaccatctattctcccctctacattgtactaactttcgttccgcttgattgaattagtaaataaacggtgaaggtaggatcttccgagtaactacaaaatcttagcagatattttgtcgcattataaaaggaagtatattctattaatcacattcaccagacttgatctgtagagcctctttatcagcaataacatttgctgggtctatatccctatagagatcttctaataatcgaaaatgctccaatctggtggcgaaatatcgagtaagccgagataaattactctcgggactttccggcaggccttctattttactgaaatttgttcgttctagattgggatactgctgttcctactagtctcttagcttaatggcgccgaaaccctaagcctctttaggcattgtgttacttactagctgtttatcattagggggccacgatctatcctcgactgagttatagataaacgacccttactgatgattaaagaccaggtagatatctatattatagaacttagtaagcttataagctttagcttttaatgtctgggactgccttatgaatttaactcgggagttcctgtaaggatcggggccacctatgactttaatatcatttagtaaaagaatctagaataaggaaaggggtaacgaaactttataagttatagaagttataagtttttactatagacaaaaaaggacttgtatttatacctaagagtttctttatcgaatataccataaatacattctaggtttaatcctagtttaaataagtgcgcgtttcctgggataaatatctctagagcctcttaattcgcgcttatatctcctacccctaataggatttcggatcacgtcacagctctggtaaggttatcggtaggaatacctatagttgtcttaactaaacgaagaccataggccttattataaaataaacgatattatactctctaggaagccgctaatcctttagtgccttttagagctagtctataaatatatatttaccttatactctagatagtgggctaagaaagtaacggagcggctgtagtatctatataaggggtagagactatctagacccctaaacctatcgattaatctataatctaagatatagctaagcctattagggtagagattttctaaagctaagattactatctaagccggccctttataatatactaatccgcgatactagaatagagttacggtattttctagtaataagtcgataataaagaagaatctagagataagtagtgtagttactatatcctaggctattcgtctactactaatatagaggataataagatcgcgatagtcctctatagccttaatagcgttaatagtataaggtatatttcctaaaggtatatctaggcggtaactattacttttaatagaattatctagatagcttcgctattttctctaatcgctatctgtctctatagttaatatctatatatcaaatccccggtatacaaaactattataaaagatatagtagaaatatagggtttacttattagactgcgcttttctagtacctaataatagtattcttatagaccctatagctataggctagatttagtatgagacctaatatataatctctcttataaagttatactttagtctactgtcctagaaggaaccgattccctatagatccgctagcgtaaaaaaacttataacctaatggttagccctacttgtataaaataatatataagatcgacttataatagagccgcggcggtagctcttactctagattttagttagcgcttaactatagaaaatagggtatatactaagcttaggcctatattcgctatatagttagtttattttaagtattatatagatatattatttagaagtctagttatattagtaaaaacataggtagatataattattaaacttgctatttttattccctaaatcattggctacattgaagttacctattataaaagtacttatatccctggaaatgcttgtggttactaccctgacctttgggctggagtatcgtggtcctagtagatcttcttaagtagtactaaaaatataataatactctctaaaggtactttttagggcagtatcgaagacctgtgaatcatagcagctattatataggagctatttaacctatttagctatatccctaaagatggatataaatctaaatacttagcgaagtagtagaggtaagatagaggggtgtcttttatagaaaatacgatataccaaggtattgaatcgctccgagtaatatgtaatgtcctatattattataaataaactaagggcaataaggctacctataatatcctttattaggtttcctgattctaaaaaactatatttatactataaggttactaatttacctaaacttatactaagtataagatctactatatcttatattatatataggtatagatattcctatactaaaagtaggaactctaatagaattaccccccttattctactactattaatagtaaggattatagggcttatagtcggtagaagaatatctactactaatagcctctagtagaggtaataaagatagcccttaattataaactaatactctagcctaggggtagggtttccgaaaacctaagtatagcggttatatactatatatctatatactagaatatattatatagaacgcagaaggtagactagataaatacaattgctttgtatataatataactaactactaaaagacttaagttcttctttatataaattcgctaaggagactgtattctctaagaatcgcttatataagtgtgaaaaataaaacttaactagatcagtttcttttataggatatacattaggctatagtaccttagaacagcgatatattataataataatagaccaatataaagttctaaatactatataggggttaatgactttctaatattagctttagcctatgaaatattaagataggactaactaagtatcttaggtatatagtagtctataaaaagtgtagacgaaattgtggtagctaatctagagagagagagattggtatagtagctagtcttaagataatacgctaaatatagctctatatataaactaatagggcgatccttccttatagcttttataaaatcgaacggataagaaatatcctttagtatatattagattactgcttgaaataatgctattaaatacatcctattcagctaagcttagttttcttattaaatagaggaaatggtatcgatctattctgtgattaatactttgatttattagaatcttatgatattagagaaattattatcttataggtataaagatatagagctagagaataatccagatagattgttatatctactttcttagattttccggtagagtaatcctatactaggcatacccctctcttcttttattatagatacgctatgaataaatattacccttagtaaatattgtgataaaaaggaggatatagaataaagctataaatagctgataagaaagtatatgacctttttaagataggcagtattattaataaagatataaactatatctataaagataaatattaactgtaaccatagtactagcagtattttagccgctaaatagttattctaaggaatgggatggctaacgctagtattaagtctctttatagggtataatttattggtatttaggatattactattagctaataatactggccggcggctttacaaagaagcgatattatatcgcagttttattagagcctcagatttatacctttttatattattcagaggatagagctattaaagagtgtgattcttggttttcctgctaaggaatatatataatgatggatattggttatcttagttatataacttagagaccacacatcgcagccggctgttatcctagattgtaagtgtggaatcttcctaggtgctaacatcaagccagccaatatctatcgagttttacattgtgaagtaaaaataaagaatctacgtctcttatgccttacggtacgaaatatttatatataaatattactccttcatatgacggacgtgtttcataactagggtgataatatagcccatatttacagtaaataaccaaacaacctcgttctcacctcatcttcaccccagtcctcacctcattctcacctcgttctcaccctgacccacatttactggtatagatcccagactacgtacttttgtcaaggccagctctcgcctccccaagtccaagaggcaaaagtcaaatagggataacaacaacagggtactataaccaataaaaagctcccattaaccaacagttggtggccctatcctagtcattagaagtctggcgcttaagagcagagctagatataagacccatctgcagcgtccgagactaatttttattttactaccttgccctaaacatatctaattacaagcacgatcatgactacgaagcgtctctggcactcaatgtcccagatagtccgtgggagacccataatccctttctttatcttggcaccaacgaaaacatgcattgcacacaagcagacattgactcatacaacgcattgagtgctttcgttcagcagcaggatatgattatggggaatgacggttttgagtctaaagcgtgcccggaatcgtctagggtctcttcaatgacagagttatacaggggtgggtacgagtatgggataaggtatccttccccccatgataggtcccaactagagctgacaaactagcagccaagctaatgtattattatccttatcttcaagttatccacaaggccccagagagattaagactatctcgcatatagataaagccctatctatcactctgaagcgatttacgagtacgataaatcaattcggtgcactttcgcaaacgcttggtaacaagatcgaaggcctaaatagccgcttcgacgatatggagcgccgtctggacagtatggagaaccgcatggacagtatgaagcagagcatggacagtatgaagcacagcatggataatttgtctcaggaaacggaaagcttggaggccaagttcaaatctgtcaatgagtatctgctcgaggtcataaggcgggaacagagggtaatgaaggaatttagtgacttggcaagtcgctaccaagagtaagaaatataacaggttacctagcacattgcaaattctataatatgcgttggtattttctgaaagagatgaaaagaagcccaacactataataagacagcactcggtagattccacagcttaagttccttcacgtccaacccataacctgaaacatttgacaagtcaaaaacagcccccagctccacttctagaattggatccccaaagcattaggtattgctgctccgactcgtgcaggcgcgcggttgcctgtgtgagggcgtcttctagggagctgaagatatcaaacacccgttcttggaactgcaagagtatctgtttggtctctttatgccactgaagctctgctctgagatagcccatctcataagcagtttcttccaactgggtcttgaaatctggcgattgtcgctttacacattgcaaccgggactgtagtctctcgaggttagacgatgtgcctccaagacatagaatttgatggtccacgggagtaatctcctcggatatgggatcgagacgttggccagtatatcgactcattgtatttgataaaaaatgcaatcaggactatagataaagagtttcgccctttaggttggtacagaaatattaaagagatcaaaggaggcttacagcgggaggcaatgccattcctaaaaggacgatattgacaatgccctctatcaccccttaacgcaagcggaggtgataattgacagggcaatataacgccacctacgacacaaaatatgcctcaacgtatatgccagtgcatcgatttcaatacccgcctaggttccccactctatagctgtatagatttagattaatttcaccacgtgattttatccaataatatgcgagtgttatagttaggatcgacaaatgaaaatacctccatagatgcacaacagcaacggctttatcgatagatacaaggatagcaaccaaactatcactttcttgatattagaaaagaagagatgatttacagttgacttatcaatcaggccgacacagtgtaactagccggaattttgggcctcatttacaggcgtcataaggcacgcaatatcgttcgttgccgtgcacatccgtatatccacctcgcaccaacccatggcgcaccgcgcttgccaagacctgcgagtctctccgtgcgacagtaaaaacaagatacgacactgaaaacgacaaaagacttacaacactgaagacaacttgcgacactaaaaacaacttacgacactgaaaacaacttgcgacaccgaccaattcctgcgacactgaatgctgtaaataccatggttagctgtgtatcgtcacaccctacattgtttagccactaataaaggaaacgagccctcaggtctttattatatgataaaggccaagccaattcttcaagacatatcttctaaagcccaatatcaaaatccagtggtagctccgccatctactactgccattcttcgagtaaagccgactttttatccacagtagatataacatttgctgattctgtttcaaaaatctaggacaatacaaacaccgcaaaatataacaatgacgtctttgtcttggtagagaagctgttacaccaagaccagtagtcaaagcattaccaggggctcttggagctcaggatcaacagcaattccgtggcattccgcagtatatatgacatttgctgattctgtttcaaaaatctaggacgataccaacaccgcaaaatatgacgataacgtctttgtcttggtagagaagctgttgcgccaagaccagcagtcaaagcattaccaggggctcttggagctcaggatcaacagcgattccgtggcatatcaaaaattacatgtctattgcgaaaggtcgctttctgggatgcagcatcaaaaatcgcagcttgaggcttcactacgtcatgccacggaaacctgtcaagcgttgtcccaaagccttcacttagaaagggacaaagtgcgagggctcgagtcccgtctcaatgagttgtacccagctgttaattcatggctacagcgattgagtcaatacaagcaggagtccggatgtgtcggtgatgagggaacaatggagcgctttctgctagagaaccaacgtcagcgagagttgatcaattgtcttcagtctctcctccacgcacgtgaacaggctgtgcaagaccttcaggctactctagaccagttgtctcaacaacccctcaaagggaacgcaggtcaaggtgggctatttaggtcctctgtttgttcgtcggaagaatcgaatgtcgaaatcatcacggatacaccttccaccaagggctgaggtattagacaaaggattttgcgtgctgcgccaggttcctcaatttcatttcctccgagtttacataagaatattcttttccgtcactagtaactagcctaagtaaaggtctcaaccaaaaacgagtgctgcgtctgtagcgctatatatacacctctggatgcgaagggaccacatctcgagtcagttcgtggtagacaaagttgtggcgttcaacattccgtgttccccgaaagtgaaactaggacagatcaggcagccttatagcgatcactacctaaacgaagatcactacctaaatggaggaccagaagctgccggcccattccgaacctttcattacaatgacgtcctgcctccaaccattccccggcacattggatggtagatcaaatgttaagaaataaatctttctttcgcctccttttcttcctgggcttttccctgttcctcaaagaaactcaatcatggtgacataagctgtatgcatgcatatcactaagacggatcgaaccgctcgaaccgagctttattaaagttttacacccctggcgatcctaaaggggtaatcccggccacttaattagaaccttattgcgctaacggtcccagtcaccaacggcgcgtaaaattccgctcacattggatattgcaactatttaggttaaatccgattttgtttcttgtccgaaaacgtatggatggacccataacgcgctgcgtctgaggcatccgcccattgcctagtaattcgcccacggttcaaaatacagtcacgacaaccgagtggaggtacgcacttgaggtccgttcgtgatttctccgactacgagctcgttgctttaattctcaggtcggccgaggcgcctcgtgattcttgcactctcttacccattacctgcagggatcgactgcagagctcagacctctgtcctcagtagccagtatccatcgacgggctcgactgtaggcacgaaccaaaccaggtcaaggtctatagaaattttgccgcggctctgagacagtgtcgcggccggggtgggagagcaattgtaaaggtcggcggcaacactctggtagccagaccggggtactagaaacagtgtcgcaactctttcctacattattttaccacagagtcccagctacacgggagttaatacttatttcaccctagggcaggtacaatctttttttgcgctcttcgataagttatatcaaggctctccaagctttgaagtaacatgacaattttcgcggatctacctttcgagctactaagactgattgtcgttgacctcgattactactccttgagatcgttttcgcttgtgaatagaagatgcagatcggtcagcaccttagatatcttctatatattcaaagtcgagttcacagaaaaagggataaagaagctaaaagggctcgcaatttctttattagtataatgcgtaagagtacttcattatgatacattagaattggtcgacctatatatatgattgttcagctctttatctggctccttactgatcctttcagtaatcctatattgggactatttttctgcttatatttatataccataggagtatacaagagattaggaagatttccggtaggagctccgaggaaagcaattttcctataaggcaatatttcgatattttaaaggacttacaagagcttagagtttactcttgaaagagcggacggatatctatatatttacagaattacttcggtatctctctaatctaaatactattaagctctccttctatagagtaaaggaagatcagcttctttggttctttaatcgagtatttcttagagacttacttttcgtttaccttaaggcagtacttaggggtatggctgttactcagtctataggattaaccttaaaatgtataaagattaataggatatattctaaactggctactaaagataataatatcctagaaattgtaaaggctgctttagcaaaagttgagagcttaacgctaatagaaagcccggggtttctagggtttgtatcctctgtccctttaccttccttacggcggcttgaattagcaaagtattggcttataggctttaacttaagaaagttcctgaaagcctaagatgggagagtgctatatacatatttcaaagatagaaatcaattgtattatgaaatatggaatatggatggcgagtctgagctcaaaactttgtctgagtcctttatctgctctaggaatattggcctacaagaatgtcttgtacttacaggagatcgtatatgatcgcacaatttcaatgagtcttttacacactctccagaagaatgttcacgaataatccctgagaagttagaacagttatattgcgtcccgaaactggtgtcactacctacactcttcgattggttctcggactctaatgccaagatataccattggtatacagtgacggtgcataagtttgaacaccctaatactgcccgccctaacctcacccaatcaaatatttaaaaggttgatcggcatgattgtttaagggctatttggttaggcggtgtgtttctcttggaaggcggtaaccaaaggggtgctcaaattatgcatcgtcactgtagttccggaatatcacttcatgtattgttaccgtacagtgtaaatgttatcgaaggtttcatagaagtaaacaagtcaaacatgagctggggccttgaggattcagtaacgtgtcacttcatctgtgtacttgggttaaaactaaatgcatacctcctaagactgcggcacctaaaacgggtcgcagaggaagtagcaatatataaagcagctgagccgttctatcattgacacctgatttcgaccgagatggatgaacaaattcaacttctgggtaataaaaagcgggctgtttggcgatcaacttgcaggacgcgactcgcttagcatatatgtaagctccacagattttttaaaattaaacctactaatatctctgactagttgagaggcttgatcttaaagtagacccttccgaggtccgattaaagacagaggacgaatgtctctatatatggcagatagatgatctatcgcttgagcctctttttcagaagtatatgagtaaatactcggtgggggcctacatacagcttcactgcgaggtaggtcaaacgttttatacagttcctgcaaaggtaaacttaataaccctttaggataattcattgaacttataagggttcttatagcgcgaaaagcaaacggaccttgaaaatgttgcttgtatataatttgaaaacctcagtcttatagagaaacttagggcagccgaagacaaagcatctcgcttcgaggaggcggcaaaacaagcggaagccgagataaaagatcagaattcagtcatttaggaagcgcaaatgaccattcatctttactagcaggacattttgaactggatggccgttgccgagtggtatcagaccaaatgtttgcagtgctcgagtgtattagggcaaatgatggctttcttataagacactacatctgagaccaagtgagaatcgctgttggagcttcatatttcgttgaggtacttttctatagtcttatcttgaatttaaagctttactgccatcagaagttttaagatagttccagctcgtgtgccagactaggccagaatggacaaaaatatgctataacacaattccttttcaaactggtagcccaattactatagaaatttggggatgaagtctctcacgaaacaatttgtgcatgcatcatcgtccttcgcagcatattttctggcctgcagcatagctttcaccctgcatcattatttctggcctgcagcatactttctggcccgcagcatactttctggcctgcagcatgatttctggcctatagcatagttttcaccctgcagcattgattttgaaatacgtataatcaccaccgcgggcttgaaatataaattgagtcttttttctccgaatacagggaagttgactaggcttcaagaatcaatatggttaaaaagtcgagaaagaaggcccaaaaggcccagcgaaatgcccgtgatatccaaacacccgcacccacggaagtgagctcagactccgaatcccatcaacctgaatcctcgagagcacaagaattgaggcaagagcatagctaaaataagaagggcaaagctcccgaacggaaggcgagatttgttagaagcccaacactcccagatgactttaccccaaatgcgggtgaccacgaatcaaatgacgaaacggatagcgaactaggggatgcttctaatcaagatgctcctattaaacataaactagacccgctaagccgctaggttaaggatatcattcgcagcgagatatcacaagagtcggaaagaatggttaaggagttcttcacatccccaagccctcagtacgaaagatatcaacaattcttttaaagactaaaccaatacattcggggcgttaataaagaccacaatatcaccgaccttaataccggtatcatccccgagtctggctacaataccctatataagacctagtaggaagaagtaagtaaggtagtagtaaaaggctccttagaggagttttaggtagcttataataagacacgcgctcttctaaagatctttaataaaagatattatcttcctaagaactagaatatcagtcaagtataggccgagcaatagatcggggcaacaaatcctaatattatagaagataccgactctacttccgatagtggcgagagttagcccgactagactcgccagcccttagctagtaaaaagtctagtgccgaatcggatattaatatcgacggtaattagcctataggacttaataccctagaagcgagaaccataaaatagtaataccaattgtactcggctaaagtattatattagtggcctaaaggtactagctctcagatctttatacgctacggaagccggtctatgccgatctatcgtattcaggctagattatataagagctataacccaagtcgggttaaacgtgttttaaccacgaagactcgcggcaccgctaaagtaaccgggataaggaacgggcttcctgaggagttttagaaataccagcgaaaggacgtggaggacttcattggcatcggttggaagatcgaagacgataataagtaggggcttaatcctctcaatctattactacctactaaaggcatagtatatccacaaactcggatacttgtcaaatagaaagacggttagtttactttagaagggcgaacttttatctattatatcacagccggctctgccttagatagtaatagagtgatttatcagaaagccgaggagctcgaggatatttatcgcagaaagtatagcttaaacgatattaataaagattataatagtgaagttagtaagcctatatactatttgaactaacgcagattaaagacgaggaatcactttgaggccagtgaaagtagcgacgatgggagcgacgcctctattcagtcaagtcacaaccacaacagaagataccgcagtgagccagctcgtggcctagcctcgtctacacagggacgaaattcaacttataagatgagaaaggactcggcgacagagataaaagagcttgagcgtcggattcggctcctgaagatgcgcagcccgatacccactcaagaaacgcaagaatcgcaacggagacgacgccgaggtgaccgtgggcgcatagcataataagcacttgtgattttatacgttcctttagtcttgttatgagccggtgttaagccgaattttttgctttcgtattgtttctgatgagctggcctcacatattgctttcagtcttattttatagtttagcttagcttagaaattgccagacttgccttattttctgaacgattgcatcttcccatagtcctcttctatctattatgcttacgcattaaccactatgggcttccttatgaacttttaccatccatttctgcattccatttataaatgatgatacaatgttttctcgattggttctccacctgtatcgcatccctgttaccgttaaacaatatcgatagagagacatctatcctagaccggagagtttaattgctcgacgtaagtgggcttgacatccaaccatacaatgctactcaccagtgtcctatcaagtgccggggctatgtcagacactgttagtcttaggtataaagttcttcccctagcccgttgcttactgtaatattttctttttctcttcctacacccgtctggattaacattcctccgatgtaaacaccgggccacgatggcaagccattccaacactattattatagccgatgacgaggaactgccaaatctccagccaggtagctcacgacctcggagggcacctcgctataattacagctacgaagattccgagagcatgtttatcgatgcagccgataatgagactcgatcgcggaaacgcaaaagaaccgaaaagaagaagccgtctgctttggtacttgttcctcacaccctcttcttcgtccttatctaataattcattaggacaacgctttccagctgcttaacaaggaagtccgccataaagtaaaacggttgaaaaaggaaaatcgaatgcgtcaagatgaacttagccaggagaaggagaggtaccaaaaggcgcaagtggatctttccagggaaagagaaaggcgtgttttggagtgcaagatctgttatatgcaaccagatcactgggtgacaattctatgtgggcacatggtttgcgagtcgtgcgcggaaaagctcgaaaccccaaagagttgtcctatctgccgagcaccatccacaggacatatcaaatgcctaccctttgcgggataaaccatgtatatcatgttctggattatctggactaagaagcgtctattttgccgcaaaagcatactgcaggatgcgaatatggaacaactaatttccaaatgatcgagacgccgtcacggtcaaattactttcaaatcaaacttagctagacatgctctcggtattgaatctggaaaggtaagcgcgccgtatttactatggaccgcaaaaaaccttgatgcaagtattctctgggatggataggggaaatgggaaagaaaaccattggttgcattagctaactaagagagaggagtatcaaacactagggtttcttagaagactatctcaacaattcaagaatatcgtatttgttaaacttctctccaagacatggaattaagatcaatggttctgcgcctccgatagggggtggattcaaccatccaccttgctcttagtacctctcatccaagctatcaataagaaccggttcgaggtcatcgttgtactttcagtgtacatcatgtggaagctctatctcatcaaattcaatttgataatagtggttcttctcgagcaatatatatcctctttcgcaaattctcattctgcgctattctcttcagataattttcggcctgcttttgttgaaggctggtctcgggggaatccggatcagatgtttcaccgaggaagaccgatgtattatcgtcgtcgtcaaacttgaaaatttgaccgggtcgagatagatatagcagaagatcgtggatctgcctatctccggatggtggcatttgtaaagtattccgcattatagcggcaaaaaaaaaaagaaatcctaacagtttctgatattcctagcagggagttcgagaactaggagatggttttctttattgacgatggcatcaggtgcggagattgaacgatatctaagaacttgtccacgtgacctgggtctgctgacatggatcaatgtctgatacgaatcactcgacgttaggacggaactacttcccatcagaaattgcattcgtaaatacgggaatatcaatattccgataccacttttgatatggattagcgtgtctttgggcagatcatctggtgcattaattcaggtgctagttacatgcggtgttgccagaggttcctctgctcttcgaagtccaggccttgctgcactttgtctcttatgcacacgaaattttacagaaaaatttcatggcaaagtttgtttgtaaaaatgggtttggagttcgtaaaagcactccatttgggcctcaaaccagttgatacagcgttggtcatttagaatattgactgaacccgctgctatagtgtatttggttatcatttcacttaaagcatgaaacgcggtctcagcatacgaacgaccgaactcggcagcaaaaagtgaatcggagtttaacaaccgtaaatggctcagatcggtgtggtgggatttgactcgtctaacaatagcttggtccactgctaggtcaaactgacctttgccaagtggaatagcaatgaaaaccttgctatcctcccctggcggaatatccgtggtgaaatgagcgagggcaccatatacgtcggattgttggttgcaaagatcgcatttaaaattagattagatacgcatagtctatgtggttggctttagtaacattctggtaggtaaggaggatatacactgacttggagtggttccatttgaaagaacttatgtgctagtctctgctagcgtgattggaacccttggtgttcggcagaaccctgatttttctgaggtggtaagtagcttcttataggggagaaacctgattgtaagcaataaacggacaccgccaataacgcacaaaaatgtccaaaggtcatatcgtcctaaaacagtatagctcagaatgcatgccctacaaagacattattccatccccagaccttaactagcgttgttactcgttaaatctgtcaaggccattcggtatgtcggttgatttagccagtaaccacaagcggtattgaggtggcgatatgaaatgtggcaattcagctgcaaatttgggtactaagaacgcgaccctatgtccagaagtagtatagctcagaatgtatgccctctttccactatatccccatttaatccgtgttggtcaccgagtatgccgtgcattatgacgctgtgttccttatcgccacgtaggtccaaattcttctagcgccttccttataccattactctttccgattttctcatatttgtaccacccctttatttgcttcccttgtgactcaactacaacacgtagatttgcttcgctcaaagccaaagctcccggatactcgatagacaaaaccttggtaacatttccctttggtggcgcgggatcacttgcttctccatgcggcgaagcgctaagacctccgctgaggcgcattggatcttctccttgaatagatactccaccataatgaagtctcatgtctggcgggctacttggctgtccttgtatgttcggagggtagatcttgcccggttgagtctcaatgttccccaagggaagggaatccggtagttctgttgggtaatcttcagtgtcggcctaagcagttagtcaatttgttttaatctgctaaacagagtttgcccataccttcgagaccccgaaacacaccattagtagcgtaaagatattaagccttgacacggatcggttcgcaaagatgtttgctatagttgatgggtagtatatggatccccggttctctggcaagtatagcttatatattggagccattatcacaaagatacccatttcaggggcatgcatctactatcatagagcctaggcgggtctatgttctgagtaaccaactaaccctgcggggatgcattctatgctatacccatttggtcaccttctaggtttctgagtcagcggcaggggggacttaaccgacctgagcgactcccactttcacgtattgacaatgccagttcgccgcaatccaccagtcactgcggagggtctgcttcacgacctatccattcagatagaacatttttcaaggtttttggaagccgacctctctccagctattgcggaaaccagcacagccgtggattttatttcacgtggtgcgagctcacacttatagatcgtgcgcctacaaaccatccttcgatggtcttctctagccttagaagaggaagaatggctacagacgtaaggattagagcgtgcatatcctaagagacaggtccgcggtgtctagtcgataccgtctttccttcgttacctagggcggttaagcgatcataatgcttatagtgctcttcaataggggcgaaagcttagaaggtttaagattgagtttagtgagggaattacacttctattcgccccggtcttacctactttccgccgattatctcttatcgaagaagctaaagccatacagcttctaagagctagccatactaatattcttattgatacacaacgacttctatattttaagtctaggtatcaggcattggtagtaactcatatcctttattatatcttataactaacacaattctttatctaggttctgcgtctaatactaccgattccctaggacgcgagctgcctaaaccgttatgaattcaaaaacctctggcccgtacatatcaggccccattagtgcgccagtgctcccttactagacaaaggagcctccagtaggaacctctatctccattctaaccgatccttttacgaaaaggatttcgttcggccgtagcttccgcttaactggttggctttcccgcgtttcctctttcgttaaatcctataggtatagcatgaaagtcactctgatttcgtcgatattcgaaagatcccgaaagacagataccgcaggatgagatgggtgcgcaagcctggtgccccatgagtgtttttcggaggagataacgataacggggccttaacgacaggtaaagccaacttcgcctatagcctccttgattttccgagtgaacttctatttatcagccttagtttaatatactctttggcaaacctactacgtcgctttcctcggtcccacgccgcaaaaaccgcgcacatgtgtcagcatctcccctaccatagaccaaaggggctttttctacctttggccataagtgtagagaccgcttcacttcggaatttatgtcggctccgtcagaggaagctgaaaacaccacaaagcccgtgatctccattccggatagctcattgtaacgaggcgatctgttctacgctgttgtcatgtttgcgtccctgtaataggcctaaacagtctagcttgatagagaatagtcgcaattgaaactgggaggagggatagaaaggcaagacaacgagacatggagctttatatatttggcatgtttgaatcgagatgattctagttgcatttctcgatatgaatctggataaaactagcaaacacaagtattgaccctgagagttgtccggaaactcatttccccactgggtttttccactccactagcgtaaatacgagaggttcgtagtttatctatagtagcctgacttgtaagaagaccatagtactcgacatagaaaccgcattttaaatgcataatcgtccccattaagacgcctagtctacgccataaccgaatctgcggggtcggccgccacctaagaaagccctagctctgaagagcctatagctgcttagttaagcgtgagatagtatgacctcggggactaattaatatccaaaatccaaacaggaagaacagactgctgcattgaaaactagtaaaggaaagctttgttaaggtcatctgagcaaacaaccgcctagtcggccggcaacagtaggcatacccggggattgaatgagcttcgggtacatattttgggcaccaacctgattgagtacaatgaccaatgctaccctatcctttgaaagtctctagagcttctgtcaccaactttagactggctttcctcgcttgaactttaatgctaaccactccgacagtcttattcaacccttgaattgtttggatcttctgagcagcaacctcttccaaccatgctttatcgctttgcaaacgttgtatatcactattggagcattcgcctaagaggagcaaatcatatatacaactcttagagcacgctctaccgacgatcgtgatcaaaagatcctcagagagtatacagcctgagaggagcaaatcatatgtacgactcttggagcacgctctaccgacgaccgtgatcaaaagatcctcagagagtgtgcggcccgtgcggcccgtgccgtcccttccatatcccggaggcgggtgttgtataaggaattcaaatatttcagcgctctcccgctccactttgtcggcagctgcagatacagcttagcgccagtcgtcgtggctttcggtatggttcgagatccacacgactccggccacgcagttgcgtctcgccgcataagtcaagaggtcttctgggatctcttcgtcatggctccagaaccaacctaacatcggttcagggttttgttagtataaaagctgataccaattcggaagtccgttatttggattggggattctaagatccacacctcggtgtagcagctgatttgctagatctatatcggcaaatttgcacagattcattatctccgttagcccaagagttaattcaatttcaggtattgatcgaagacgtttccagcagctctagaacaactgggcatcctaggtagtgaattgtaatatcgtcatgtgtccctctaccgagatagatttgaggaggtcgaggggctctatcgcagacattgtccgctctatcaaatcagggttctttgaatttgccgcaatcagatagagggtttgcccatcccgataaaaagaggagggacgaattgtttgataatcgagtagaaacataaagcactgaggacaatcgacgattgcttttaaggctaaatcatgcggagcggttttatcgaaagtacgctgacgagtcttcgtatggtcaaagtcagggtagagttcccaactagtctcaaatctcttccgaagcgaaagtcttctaagaacagtgtgaatcctagttttgaagatagagtccttctcctcctggcaaaaagcttgtagagtatataaggcatcatgtgatccaagcggctcggaaaaaacactagcctcgataatggaatctataagctctgttggcaatttttcgattctcccaaggatattgtctggccctagagaagactctgcattctctatgcctttatagacagcagtatttactcaagggtctggcatttgccaaaagttgatgatttttggaacctcgatgtttggaagctcgagtatgctgtctgattcggcgtcctctataccttatagtgagcgagaatactatcattgcgcgtatttgtgcaacttacgattttcttgatctccccagactgacgagggattgtcttgaaagaaaaaaggaccaacccacttcggcagtaggctttgtagcgtgagtatagggaaacaatccatgggccttttttgttgcagttatctagaggcatgaatacaatcaaaatagaagagaagctcatttatgtttatatgctcactaactatagcagtacggtttgatataggaaaatatatccgccacttgtccaatggtaggctataattgacaaagagccagaccttcttaccgagctaatatttcagattttatagatcttgtaactaaacagacaatttaccttgaccctaaagggcttgctatgtcgagcttcttctgtctatcccaatctttgcctgaaccatatgtgagctatggtatggaaatatttagaagtaactagtaaactggaatgtactaggaaatttagtatggaaggaatcgaaagaaataataaagtatcagaatacggaaggaaatcaattattatataataaaatacagagtgtaggtactaaagatagaagtaaaaaaggttgtattaggggaagagagagctctctatctaactatctaactaactatcataagggtgcttaactagggcaccgaggcatccacagcatttatgccacgtcgagcttcttctgtctatgccaatctttgcctgaaccatatatgagctatggcacggaaatatttagaagcaactagtaaactggaatatactaggaaatttagtatagaaggaatcgaaagaaataataaagtatcagaatacggaaggaaatcaattatcacacaataaaatacagagtataggtaccaaaggcagaagcaaaaaagattgtgttaggggaagagagagctctctatctacctatattactaactgccacaagggtgcgtaactagggcaccgaggcatccacagcatttaatattgctcatatacgtcaaatgggatgatatcctgtacgtgttgtggcagggatacatggctagagattggcataaaggcagactgcggagctgcggttctgatcgagaacgccctgggacgttagctgattttggatatatgagtggggaacttgtgcttacagataagaagtacttgatgtactctgggttgggcttgattatcacttcgtcagtcattaagccatgaaagaagaatatatcacccactcgtatacgacaagtctcagccctccaatttgtggatcgtccgagatatcttggataacctctgaattctgaaatatagccgcgatggaatgagaatcattcacgggagtgagtgacccctcttcaagcctcactccagtgatagtttcttcgccccttattcttttgtcagataaattggctgtgctgccaggagtcaactcacagtggtgtgcctgttgcatcatattctcggtaacaaattacgaaaacacggcttacgtcggcccttaggccagataggccttggctaacattgatgatgctaattgtggacgatgaagacaaggaaataccggcaagtctctcttttaagggaaaataggaagtcttgctgcgagaataattatctgggaatgagacaatttatagatttctgtaggatcgcctaatttgataaagtaagcaacggagggggtctaattcgaaacctcaataatcaaggttcatacaatggagcgttggttgctttcaatggagatatgggactcgaacttatctcccaccgagcatggaaggccacacaactcataacgtgatccatcacatcatattcattgactagataatagtcctaaaagtacattctttctccattcatcggagaatcaacatctaactatgagctgaacaaatttcatacaaaaaacaaccatctgccctaggcgttcaatgattctactatctcaacggctcgaaatgcagtggccaaattcccatagtcgagctaacagagatatcatatccttcctagctggttctctaccccaatgtccaaattatccacaagatgacacataaggtcctccctattatataagtaaagtatacacttgattaatatacgtagggaactaggcggcaggatatctattatcagtagactatatagtataaccatatattctaagtctatattaccagcatttaaccctattagattcttaataaacgttagaggggtatatcctatatactaagaaagaatactagatagcagatcggtagtaataggcctatcattacatagggccgaagagacaatataagtagcgatatcgctatattcaatcataaactaagggttatccatttcacggactgaatagttagttagatatctgctatgtattagatcaaagaaaaacatacagaattgacttataacccgtagcaattgcgcggtgaggggcttggtaggtattattggcgttattaacatagctaaggaaaagaggaggtaaaatgccatatgactggaatagttagtagaatagttacctaggaacggagacactttatagctttctacaggttcgcctaattgataaacataagcaactgttggggcttcttcaatataaatcgcacgaaaacagacttgggcgctaaacccgataaaaaaaatggcgagttcttgtaaagatgcaatcgactccaggaaattaaagggttatgatctataaagagcatgaaggagggaacacctttcctaaaagccttaagtgattatttaattggataattcctacgttactcagcaattttagagagctattgtatcgatattgccagtccaattaatgagttatcattcaaattcacaccaatttccttatagcttcacgtgctcatcaatggaagcgagaataagccctggctttcaaacctcaaggcttagccacacgacacttgccacatcgatgcctgaaattctgttttcttagtagcacttctcccattgtgcagagacctttggtaaccttatcggcacatggaaatggcagagccgtttccacgcattcacatccataagtataggtatattgaaagcacatgatacttcactataatctatattagcctccgtctatacaccttagattgatggtatcgcgaaccttaataataaaggcctatacaacggtgcgttgattgttttcaatagagatgtgaggctcggactatttgcaggcgaagcaattcagcacagagctaaacacatagctcgcgggctcttatacctaacttcaattgtagagaaataagaggcagaagtgcatagaatataaggataaaccaacaatagtgcaacggtaaagtaatcaatgaaaaatgttcctccttcaatccggatgtagggcaagggatatatataatacaagcgaagtttctcattccagaagcagagcttatgctgccaccaatagaacctcaatcaagcttgaatatcaaccaagtctgacttctcagcattactttggcggtggaggcgggacgcccagcttcttgacgcctgttgtaacgtataggccatgtatttcaagtcactgtcccgacacaatgaacagtccacgtatgatataaatagcaggtctcaagtacaattgatatatatttgtgattaagagatagaaaagtccatgttgaaatagtaatgaaataagcttgtgctatatactagccgcagatttcgacaggagacatttgatatttaagcttacagagaacggaagaactatctaccgctccccggagattatccacctttcggagcgtcccaacgagccccacgccacttctgcccaatatcatctttgtaagacccttaacaaccgtctccccttcatgtgagtaaccagagcatgttgcatcggctgtactgataaaacttcaatagatttcggtacagttcaactacattcgcacttactcctcgcaatccaagcgcatatctatagctacgaagggttcggataacaacttagtagaatctttagcgataccttcatctatcaaagacatctacactgaggcttgcgaaaataatcaatctctagcagaatccctatcaatcccttctgatcggatatccgccactatgctggtgcaaggcagggggagggaggtaatcgccaagattgaagagctctctttggtgaggatgcatgattcagcttcaatacaattgggttctgacttggaatagaataacccgattcgaaaagagcgccgattaaaccaatacggaataagacctgctctccaggttttctcctcaggtgtaaacatagttggccaaccttatatggcaattataccgttttacatcaagggaaaagtgacacttggcgaggaaacagttcagttggatcgctactatcatgtgtatggtgaaagtcgactggtgattgagaataacgcgaaattagggatttgggggtataaattgggaagttagcattatcgcctcattaagatacataaagttcctagtgagatcatagaccgagattgtatagtagggcgatacgttcaaaatcaaagcaagacctttaggcaatatcatccataattccagaaatattaataggttggttagaaatttgttcatagaaaaggtacgcaaattcggcctcattacaatcctctagatttagcgattcggctccattactagggatatcaacgtttgcaaaccccatattcgatagaaccgaatcttgcggaacagaagtatcgatacatcggaacttctgtctccctgattccatctccgaaactcggctataacagaacatcacttaacaaaagtcagcatggagtaggttaactcttgagcgaagtcaactcacaatcgtaggaattttgcacttgactaaaccatgggctaaggtctcgtactagatcgagcagatgtatcttgctctgcaaaatcgtgacatatatgtcgtctgaaagtagtttgtccgcaaagcgatgcatttcatcatagcggaatcttcgaaattgatctatatgcagcccaacgatggcggaagttgcattgcatatgcttggcaaaccattttcttttaggcgttcggaaatgatcttctcaaaaaccatatgcttaagaccagctgataaggctttcgagaagaaactgttgttcccataattgaaaatattggtgttagaaggactcggagacaagatgtgttgataaatttcctcgagtttcgttggataaacttcattatctagctgctcgtttgtgaattccagagcaatcgatctcagtgcaagaagtctcaagagcttttcctcagggccaagtgttcgatctccttctaggcgccttatgtgctccaatcgaaggtcctcgtcacagcttcgcttgcgagatagtaggtgacttggtaacttttggccagcttcccaaacccaacttgctgattgctttattcgtttcaacaagtcagggacatggtctggtggtgaaagagcacgtatagactctgcgcgtatagcgctaccgggggagtctctggtcggtatcaactgggcggttaaagcggaaacttgcaggctatcgaagtaaggtatttgtagaaataagacgccttgatcactgagtgccgtcgtttcagcaacttagaaaggttaaggtgaatgtaggggagatagcacgcttagggtttccttaggaaaatgatcggtaaacccagcagtctgaagaggttgaggagattttaaatttggcacgcctgcttggtctccgggttctacaacttgataaagttgaggtaaatgtagaggagatagcacgctttacaggtcagtaagagtcgcctgaaaaccaggtatcgagggtattaggttgtgctgaagacgttaaccgactctcctaagcgtcaaaatggtctgtgttacatgcgagtgaagatcgctatcagatgcattgcgtattatctccaaggctactagaaggtccattttgataagagaagagatgggatagttcaaaattacattctggagtcaggcttactctttagttttttaccatgagcttggacccacggtcgacactgcgaacttctggcgagccttaacctcagtcgagtgtccaacttcaaacgtggttcctaaatggtccccgctagctagaccagggttcggacccacattcgagtgttcaacatcgaaatgtgggtccgttttgatctatttgattagcttctacgtacgcgcaaggcgcggtaagtagttgaaagctgggccttcgcttgtgtaatcgttcgaacgagagcgattcgctaatcacaagattgcgcagtccgcctgcattatcacacgcctaatgtaggcgacctgcaagtgttcctcactccttagttgggggcggggccatttcattggacagccttgttcgaatacagtggagaatacgggcacacctagcctggccctaattggtatatcatatcaccaccgcgtgcggggttcgcactcgttcgtccaggaaataatcggcagagtgcagagatacccaaattagagtgagttcgtcttcactatccctgccgtcctatgggttgacaagattagacgaaagacaaaggaagatattgcaggcctctcctcttttttgacgtatcagaatcagttctctattaacactaatacctctattagagggattgaattatcatacagcgtagtacattctggccaaccactgttggtaatgtgggagaaaagcccgttcatttcaatttggtttgttatttgttcccacgcttatattaatatccagtctgtcacccctaagagggaaaaagctataaagccgttgaagattccttatcaggtaacatcttctatcattactaccatcgctcttactacacatcctcttgctataaaccgccccgccgaaaagcccatactatcattgagaatcctcagtgacctcataccgtcgtcgaatataaattgtccaaatcaagcttacaaaaagggcaatgtgaccgggagaactcactgcgagttctgcggtaccaaactcccaggatcgatatatcaacccattattttagaaatggtacgtctcgataatatcccggcagaacttcaattccaatctcataaatactagaggactaccattgcttatgaacaggttggtacaaaccaactgtgaaaaaagatgatatctcggagtctgcgttttgcccgagacagtgccaatcattatttttactgtgaacaatttgtggaacaaagcaatggctctcttcgattcttaagtttctttctctagcaaactcgaaccacattcctttagaagtgccagtcctctctcatttaacttaggatagttacgcaatacaaagaaatccaaccaaaaattgcaggcctcagtatgatccggtagatatatacaaagcaagtctttccattctttatcatcttaccccagaccaattcccgcacaagtaaattcccaccaaacagggaaaaaggccgaagattcccagtctagaatccctaccagattaccattctcgacaataatattgacgttagtcaggtcgccgtgagtaaaggtatagggagtcgcagctggcatccgctaacgtaatttcgaacgaacttactccagaacttaagtcaaggccaacgacatctcagcccataattcatcgtcagatgaaaatggtccatatccaatcccatagccattcagaaaaagaaaggctaagtagattaggtgcccgccgatactttccagtcggtccgagcgaagctcataaagctgcatcaagtactcagcagtctgttttgcgacgcgttctttgtcggccgatgtcatctttggccaaatttcactcaatgtttgacctcgaatccgtttggtaaggagaaaactagccccgtcgtcttcttgccattcctcaacgatttgaggtataggaattgaggttcttgacgccaaaaacctgacattgggggcctcaaagttaggtgggtcggaagaccgttctttcaggatcaagtttgagcctaacgaccatacccctcgattgctgacaccgtagaagagattcacataactctggtaacgacatacatcttgacatgttggagaccagctacacgctgaacaggtattttcggtagccattttgtaaagaaacgattttttctaaagggatgtcaaattttgggggagtcaggagcatcaaaggcttttatactgacggaaggaagggggcgatcggcgcgacagagtgatgtatcatacaggataatagtttatccgtaatattcccaattggcaataggttgatttattttccagcggagtggccccaggcgcgtaatagaatggccttggcacattatgccagtggatcttctaaagaacaacaaaggctccgagaagcggcagagtgccgccagggaaaagacgaatggcgactccagcccaacacactgtttggattttcgatcgctgccacatctctctgctcaagcgatccgacgtgagacggatacgaccctcacgactcagtgtagggcgaccgacccagtgaaccgattttgcccgcagcgcatagtccatttgaaacctgagaaaatctaattttggtgagtgctgcggtctcttgttgacgtgggggatattgtcatacttccagatgctaaaattagccagcggaaaccttgtcatttctcggggaatacttctaccggaaaccgtgatcagctgacatcagcctcccggatcaagcgcccgccaaccgagacctatacctatcgcgattgtctcaagggaccaacatcgatggctaacagcaacttgccagattataaggctctttttctacaggcggaaaagagactcaaagaggccgaagagtaacaaaaacaggccgaagagcgacagaaataggaataagagagaaggaagcaggctgaagaataacagaagtaggccgaagataaaggcagacaggagaaagagagataagaacaacttcaagagctcagccgaccgaccactttcgcggaattcttacgccattcgcataacctactctcctaaccgctaagagtcgagataccatctcgcttaactaccagcaaaataccccttcctactaggaaatattgcctaacacaattggaatactagaccaactgctcagtactacagtcagagcttttcaattccgtctacagctatctctagttaataccaggaggctctccgcgtttattttcatccttgcatgagctagaaggattaggccgacgacttggtcgcaagcccataagcagcgagcaggaacttgaggcctatgagcggttcgccgtagaagagcacatcaatgatataataacggagttgtgcaagatacccgctgctcgcgacgagctcggcctcggagatagcatccagttcagcaatcatacgaattccttgaatgataacgttgccattgaagcagatacaactcaaccgtcaagtgtataccacccaagacctgaccaattctatatccatcgtgtcgaccgcaacactaccactctcctcacatcggtcgagtataagccgcctcacaagctttctgtcgccacccttcgtatagggctccgaccaatggacttatggaaggatatggttagatcaaacaaaataccgactaaccaggaagcgaagctaaggtacaatgcagagcgacttgtctgctccgctcttgtccaggagtatcatgtgatgatccaggaagggctcgagtactcctacgtgaccaacgggattgcccgggtcctccttcgtgttccacacgatgatcatagcacgctttattacttcttatgtgatcctaacagcgaagtgagtgcagaagttgaagatagtttccaacaaccgaagacttctgtggactaacgggattgcccgggtcctcctccgtgttcgacaaaacgatcctggcacactatactactttctatgtaatcctaatagtgaagtgaatatagaaatagaagctacctttgcaaatacttctattacaaaaacactgtatttatatctaatagtattccactcgctagtacgaggttaggagtagaggaattccgtataaccagacattctaatatagaagaccagtttcaattacactcgctcttatattcctaaagacgaattccagtaacttcctcttaactctaacagtaccgccccagaatttccaagcccagattctggttcgacttatgaaccatcgtcatctccgccagatttccctgaatcaacagctcgtcaagtgtctacgagatctcgagttagctgtgccccatccgacgtgaggcatcgctcacagtcgtcacaatcgccagaccccgattcgaaaccagcaacacaccacaaacgaaccttcagccaagttccatcttccccatctgcccaacgcgtggctcgacaaagagatacaaataatgataaaggaccagacagccagtcccgccaccgcgatgcgcaattttgcacccagcgatgcttactcgggttgcagtctggcggtcttctagacgactgttgcccaaatgtgatgctccatcgtcgaagcaatgacgatccgcagcatccgattacgtccaaggatttggtgcgtttactaaaagcacaattggacgaaaacattgaccgatgtacaccccttggaggttgcggggcatacggtgcgccgttcaaacttacttgtctcgtatatgggtataccgtcatcggaaaaggaaccacgtcggcgctatggaaagaagtctctcgcgaagcggaggtataccgaattctgcagaaggcgcaagggtccgctgtgcctgttttcctgggtacgatcgacttggcgaaaatttatttccttcacggggctggagagattcgtcatatgctcgtgatggcctaggggggggaaagtacggcatcgatagagctgacgccacagcttctacagggaatccaccaatcgaacaaggacatcagagcattaggaatcatccacaaagaccttcggcgtgacaatgtcttatggaataaagaacttaggcgagcattaatcattgactttcaccgctccacattgaaatatcaaccgactttacagcggccgcgagtctcaaaacaacgactacctcaaccagagattattaactcgaaacgtcttcgtatgacataaggatgggtgctcattttattggagtagcatgaagcattttcggcccgtatccgtgtggacagttctttgagggctgtattggatctgcctcagcttgtggaccggggatatcaggatcccggtctcttagctgaattctctcttcaagaagggttgatcttagtggagaatctgcctgaatgttgacggctgtagatcctgaagccgaagaacacgggcctggcgtcggcgaataagcagagtttggtgtattcggttcatcgttctctggttctctcgctgtccgtatttggaaagcctgtgtacgttgcatcgcccaatctgcagaggagtcttctgtcagcatttagcagctggaaaaggcagtatacttacttgagtctaatttagatgcaaggttttgtgtcgaattttcaactttctcccacaaatagtcaaatatcttgctggccagagcatcgatcttctgctttccttcaacgcgtaatataccacgatcccgaaggtgcttaatcgcctcagatcggggtttctgtctaatggtatgactctaaaaaaagttttaaaagattaaaattctcaaggcttcgtcacggacccccacgcctgaagtataccaaggcaggagactcacaattcatcatcagcatcttcaggcaagcaaaacaaaacgccgaggtgtatgtcttccagggattcggtatcatcgacatcttcgcataaagtatcgagtctcttcccttctgtgacccatttagagaatttttccttaacctcttttaggtcactacaaacgataccagttttggaaattatttcagccaatatttctagcccattggcacagacgtagttaagacataacctatccttaagccagtagtataacactttaatcaagcgagagcgtacgatatctttctccgttctctactccaggttcttaacgtagatatagagttaggccacaggtgatctacttaaatcaaggtcaatactgctttccgtaaagaatgataacgggttatcctaccatcgatccacactagccagaaaatcgggaggggcatttatttttaaagtattaataagttcgttcgattttcttaagatcttaaagctttcttgagatcttgaagcttttctgagaataacgaccgatttttcttctagatttttttagaatagaagcccaaagtcgtctgaccaagttcataacctagtcttatgttaatttatgttgcctcgttatgtccttgtagaagacgcacctcggggtccaagagcatgtcactgatgtcatcctttccactagactcacaatcccgacaagccttttcgagtttctggctaaaatacttgctctgtgaaagaccccatggtagcaagttggggaactgtacaaaactgttttgctggtttgtggttagaagaaaccaggggtagttgcgtcgaatctttcctcccggaggtcacatgctgtctgacccttgtttcttgagcggattggtcgatctacaaatacggctgtaagcactgcctgcatgccacacagccaatcgcttttgggccagggtagcggcactagcctgatgccatccaggcaaaggtcaaccacgataaaggcgataaaagcgcattcaagttagaataatgtggttctaatctaccataaacacgctttggtggatttggtggggttgcgcataaatgcgcaacccccattaggcaattttcacagcccacataagggttagtgtcgatatctgttagaaaaccaagagaaccactcctgcaagtattctgccaagcagtgtaggggtcaaatatgtgccgatacagctgaacgtggcgtccaaacttgtacgttgttgattggccctccgctttcaaagttggccttcctagcgtttcttttgtggctggccactgacttgtgatgtgacaggtctgcataaagaggtttagctaggaagattctctcatgtttataaacactagtccctcagctgctgtggtggatctttcccttcaacctctctacttagtgaccacttgaactagccaacatctcgtcaattctattccaccttatactgttaagatacagtctgataaaatatgtcgactatcaacatggtgaaatactacttctaccggggaatgctccctgaaaatcaacagaggctgcgagacttgatagcccttgcctatcagaccgcaagagacagaaaactctaccccaaggccatcctcatcaggtgagaaagaatttcagcacaacgaacaatgatatagagacttgtggcccatgtcattagagacttcgctaatgtcgaccggcaggtccaatgagcactccagtaccagtcaaggaggcatacacaagccggatcccttgggttggcatgtcactctctgtttcaaggacgacgtccagcttgccagcaatacccatgttgcttctcatggctacgtcaagggcaaaggggacttgacttttcttcaagcgactcactcaggggtgaagccagactcccacttgaagtcgagtggaaagccggtatggccttctgaaatggaattagatgttgcaccggagattgggtatggtcactttccaagtgctggtagtggttaggtttggggttaccaatatacttggatcttgaagggtagcaaccggtcgatacaaacccaagtcttgttatgaggattcaccaggggatagtgatagctgctgcctgtaaattcgtgttgcaattggtgctttgtgcggaaaatccaagaatggtagataaagtggctagcaaaacttggcaaaaacaaagacaattacatggatttatataacacattaccgtggaaatctgaatagtgcacaggcgtgcgtattattattattcgtcagcgtgtctgcaaggttgaaattgtcagagatatttactcagtatagcaatagtatagacctacatagaaatgaaacatgtgtatacttgatccgctttcttttgcctcaccagacagagcaagacctacggagtataactagattgagcccgccagcaagcagattagtcagccccagcatcagctcggccaaatcctgaaattgccgaaccctcgggaaagaatttcaatgctccgaccgcatccggacgaattccttttttgctcaaattgaacagccctagaaaaaaagggaaattatcagatggtacgaaaaaggcgtgctcttacggaagaggaagagcaacaaggtcgggagtcccaaagaaggaaatttgttgcgtgcgttttccagatagctcacaccggagcaccgagcactaacacacagcattcacagctgtcaaagatgccactcgcataaaatcaaatgttccggagaccagccgtgtagcaaatgccgcacggtaggcgtcgctgatgaatgtgcctatgctactcgggatcgccaggtgaaagttagtgaaaagtatgcaagcaagccaccgactattattagccaaagccctgaaaagcttgtctattccaagtctcagaccagaagctaaaactgtcctcttcaatcagctatttggatcagatcctcgcagagaatcagcggcttaaggaacggtcgatcacctcggctcaagtcgccgagaccaacgacccctcgcaaaggtagacatctctttgactttccaaaagataacccacaatatacagaatactgaggtttacaacagaggccctgccaagacagcagatgtccctgatggaacaggcattcagaatccattgattggagatcgagcctggtttcaccggtatgatccctcttcgccgcccatctacatcggcgaggcagcatgttcagcattcgcgacacggtttcggcgtttcttgtcggggaatagtggaatgccacatattccgcgaacacagtatgagcgcgaagagacaatcgccgcagcgaacgaagccgatatccagtggccgagtcttcaccatgcccggttgttagtccggatagcaatccaccagatcggacatctgtaccacctcatgatgcgcaagtcgactttagataaactggaagaaatctaccagacacaagactttgactgcgcggctaacaagtgtaaattcttcgccttgttcgcctttggccaggcgtattcaatcagatctgagcccaattctggctccagggtaccaggcacatcgtattttgctcggtcaatgggattggtccagatcctgccagagagaaccagtgttacacacctggaaaccctgctactgttggtatgtggctcagcatgtgctattgttcgcatcaaaatacttaccatatcccaagtctcttttctcatactatctcaaccggcgtcattcagcatacatcctgattggaaacgccatgcggatgggtttgaccatcggcttgaatcataatatcccggaatcacagctcatcgacccagtggagcgccaacaccgcatccaaatatggtggacgatctacatcttcgaccggatgtgggggtccaaaatgggtctcccaatgcaaatcctcgatgaagatatccacgtcgacatgccgtcaaccatctctccccgctggcgccacgaggaagaactctccgactcagaatacatgaccgccaacatcaagctggcacgcatagtgggcgagacaatcacccgactatatagccggcgaaagtaccaagaaaccttcctccaacgcgttcagaaactcctcaaagccctgaaacactgggtagaaacactccccgaatccctcagactcaacatggaagacctagaatcgagcaagaaacccatcgtctcactccacatggccttcaaccaatgcgtgatcctaacgacgcgcccaacgctacttcacctcttaatgacactaagcaaaaagaggaaacctcaccccaataccggcaatcgtaccagtggagccgagaccgaaagcgatagcgaagacgtatccgtttcccaaccagtccttaccctaagcgaagcatgtattcatgcagcgcgacactcccactccatgatcctgacaaggtggatcaacgggtccatgccaaccttcggctatttccacgcgcactacctcttctcctcggcattgatcttggcaatgtccagctttgtaccaatcggcagtccgactgatatgaccgcgttcgactccgcgctggatctgctacgctctatggccgagaatgggaatttggcggcggcagaattctatcggaatctcgagcaggtgaaggtttgtttaggtgagtatcagggaggaaggcgagatgacgggaatgctgatatggctgctggtggaggtgtcgctcctaataccaacgctaatgctagtggtaatgctgctccctctggcaatggtgcagtacctttgtctgggccttcgtcggatttagcaacagctactactccttttttgaacgccttgccactgaacccgtccacatcggcaactatacctccggcatctttgatgcccacaacgcacagtatccttgcttctgccccaaccacacaacctgtccataaccatggattcgatgcatattcctatcccttgagggatgccgtcagtgggtacacgaccgaaatggcgtttctagagccgaccatgcaagattttctggcccagtcagatattgaccttgggctgctgcatcctgttgatacgttctttaacgaggctgagaatctgtatacatgccacgagttttgattgggtatatctggggcatatgagataataatatgcacgttttagacctagtcgttctggtctgtgttgacttgacaagtggctcaacactgtatggtcgaagctggtattcaggtcaagatactatcgtgtgtacgcagagagatatccttgcaggcaaaaacagttacggtctctttccctcaccatcaagccggtgtatgaatcaaaaatcccataactacatacatgagatacagaggaatatgcgcgtctagatttcggcatcaacagcaagcccaaagttcgagccatgtcgtgaaagaaggtccatgcagacaagccaggctctccgggaagaaagatctttggtcgacattgctttcaaccagtgagtcgctttgttgatctttttagtgatatcaacagccttggcggtgcctatatgagtgcgagtgaacagctcggtgagcaggatggtagtcgactgcatgatgttgtgcaggatgcaccaccacggagcgacgccatacagccaaatcaagtccggattttcaggcagcagttcgagcatttggcctgccatatgaacgcacaaggctgccatctgatcacacaccgttccctggcccgcttcagatgactgtcgggatagacggcggatacagggctgcaagattatcagcttggtcgagtagaattggaaagcaagactagcacgctgctgtagaaattgaggggttgggtctagcgttgtgaaatcaaactccaccggaagacgagacaaccagttgtcagtatgattgtttagcgtggagatggcggcttcgatctcgtgccatgactgtcgaactgctctgggagcatagagcatatcaatagcttctcgtaagagatgagccaagtccactgtgtacaaaaggtacagagaggaatttggtgttagattctctacccccgtctgtctggccctttcttcttgttttcccttgcccgactctcgccgttccggggttcttggagccatatactcttttggcgaagttgccgtggtatcggaaattaaagaggggggaaatgtacttcgagtcctttggtcggtattaagttgcgcgacacgcctgtcccaaaaattctcctctgcgaaggggacagggaggggtgtggagcaaaagatttctcccgtaccaggtggacggcctgtcatctcacatagcaccatgtccaacataaacagtgcccaccaaactcgatatcgaagttccttcgaaaactgggtgatgctatcgctctcgcttcgaatgtttagacccatagtcaccgccgatcgactcgccattccgatgagtttccatgacctagatgagcaagaccaatcagatataaatcatgcaataaatcaagaaggaaaaggggcaagaccgacctattaatttgaccaaccgataggaggtagaaagcagccaagccatccacctgtgcctgttgcaagtccggatgatctagcaatactttacctacattcaacctccaagcccgtgcaaaataagtctgatggccgtcgcaagttggttggatttgatcgacgaagaagcaatgtctggccgcaatggcaaacaccaagtttagcactataatccatcgtctcccaggtcgcacgttcggattcgcatagaaggatcgatattgattcagaaagacggcctttccaatgatggggaaggtaggatgtacggcgtgaaagtaggtgtcaatgagcctgttagcgattggttgcggaggccggtgtgcgaggtcgatatcgtcaggaactagaatttccgagtcatcttggaagtagttcacggaagataacgaagggcgtgcgggggtatctttgactgcaatcaagctgccatgatcaagaaagcgcttgagtctatacaaccatgccatctctgaatgttcacccacaaatcccgtcggttgtactttctcatcccgatcgaagtcctcttcggtgtagtctacagcccccgaggaaatagacacatgactagcatcagcacgggagtgaagccctgattgattgatgggccttgttgggttggtgaataaggtagggataggggtagtgagcgtggtccgtgaatttagctccctcagtgttttctcgacccgctgggccgacaagacatcgagcttgggataaagttcgcggagcaaagcatcgaaggtttgaacccgtgtagttagatcgttcagctgcctatcacatgtcagatgaaagtattagaacagacgaaaaaggttaacgacttcaccatcttctctcttttccggtcgccatacgaacacgggacaccggcatccaggcaacgatgacaggctgggcgatgaccactacatttggccttttgctcgcggcaattttcacaagcccggctgactcgaccactgctagtccaactactggattgtgcgttccgggggatagccaccttagcattcacgcggtcgcttgtgttgaatgaaggataatcgcgggcatcacggatagtttcggtattgagctccaggggggaaggttgcgggcattcaggcgcccagtcaaaattgaatccatttcccaggttcggatattcagaaaacggagcaccaaagttctcacccatatcgttactagatatagttttcgaaaggatttgatcataggaaagggttttcgcacgagacgcaagacgctagcgggacatcgactcataagccacactggacgaaccgccggggaagaagaatcatcccccttgcacacgaaggaaaaaattaaaaatagaaacacacaaaagcaaagtcgacgagtcccctactgtggactagtcacaagtgggtttcaaccgagatcgggtcctctggtatgctggaggtctttgccgccactaagagcagcgctaaggccaataagtgctttgcattgcactttggatggtatttttttgaatagacgagaatgaacatcatagaagcttccagactgtgaatatagatgtgttgtatcgcatagacaatggcgcgggtggtctgtacgagccttgctcgaggttttccttcggtttgtagcatccatgattcccatacatataacataaagttatatggaacccgctctctgacaggctgagaagtgatgttctctctgtactagggttcagacccaaatcttatcgccctctttcggtccgagaatcaccggtatcccaaattccgatgatagtttggcaaaccatcattgtgtcaggacccagcatcatgaatacatttcatttggtttgcttatcagaatcagatactgcacggtaagattgctgcttcagtttcctctcccttcaagggtcttggcaaaatttgcacggggatctttgttgtgctttcagacccggaaatacggaatcgtatgacagagtcctttctaggtcaacatccaatgcgtttctttcaaccacatcgtcttgtttctcttcggacttgcctcagtttgggtgggtcgatattcgttcgtcatcaaatcgaagacccactgacgttcgcatgctcatgcttaccgaaaggcaagcagacaacaaaccatcacgatcccgttgatagaagtgactatcatttgatttcctggtcttgtaatgactcgccgaagcgtggttgattgcacgatcagctgcgatgaatagtccgccagctagatggtccggcagtccggcagtcggcagtccggcagtcggcagcaccgcagcaaatagagcaatccaaacgcctaatagaccttcgaaggaagatcacagatgaaactgatcattttcatcatcaactatgaaaaatttagcggcaaaattttgacgcggacccaaagggaccggacctctgtacagctgggcaacgcgcaccagagtcttcgctcaaccctagtcttttgctggctccactgctcgaatttctaataatgcgctataggcagcattttaagcacagcctgtgatctgcaaggcgtgagaaccagaagtctgcaatgagcacttaaaggcaagacagaggacaaaatgtgaacgaaagcctcggtctttgctttatctcataatgtaagtccgagaagaagcgccacgatagtgatatgaccggtgatatgagctgtgatatgaagatgctcatacttcactggaagctgagctaaaagctggttgatgcgaggatagggatggacttcggagcaacgcgcccgttgctcttggtttttctgttagtgcacgcgcaaatccattgagccaccattcagtgtcattttcccaggaaaacatcaaagattaagcgacaaagctcccttcaagctccgctctgtgttagaggtagcgaagatatgttgttcgtgtgttggaggtgccggacaagactcggggacaatccggaaaccaactccgaataacgtcgaaccaattatggccaaagagatcgacattgtaaagcttctccgcccctatgagctcaggcaaaatccatctccgactcaagcctatcaatagcgcaacgcacaatgcagcgggaaatcgagccacgtgttggaaccgttcaaggggaccacgacccaagcgcaccccaaatcacaagacaatcgctttctattcctctttgacgtcaatgaagagtcatgtcaaagaaaaaaaatgagattgggtggcttaattttgggctcttgggtcaagcgtcaagtcgggcgttccgccgctacgggttcatgtgaccattgttgtgattgttgtgaatctagtccaccgagagataatcaagccgtctcggcgcgagctacggacgacaaaaaagtgtttcaatgatgcctgcctgttgtgtccggagaacatgcgccagcctatcggctggcacaggtcgtgcatacatgttttcttttcttgcaggctgactctataaatctgccgtttagggttcggaactagtttctcaccagaattcaattattttcgttgtttttcttttcgttggctttcgggtagcaaataattcattatctatcaagtcaattgattcaatccgtatgatgaccggaaatcagcgactgctattgtatgattacgccatagatcgatgtttatagtttgcctcaggcgaaattatcatgtgaccagaataattcacgtgaccgtggtatctcccctctgcaaaaggctatctcttgcaagaactcatggacgcattctggaagctaaattaactaattacagcgaaatgcaagcataacataatacagaaatgtctttgcgcgggcccatgcggcggtcgcacctgaggcaagtgagcgcggcgagcttggaaagcagctccacccactcactggaggcttcgaaccgtgaccatgaccacgaccaagccatagatgatcggactgtcaggctttcatcggcaagctggacgcgacaccaatgtgcgctttgggtgcacgatgagacgttttcgcgtgaagagattttgttgaatccatcggctttcggcgaaactgaagtgcaagttggcgatctcgtcgagatcctacccatacggggctctggcgataatggttattctacacttaagccagaggcagcttcgaaagctgctcgtgagggtcatgccgaactcaactcggcggctcaaacggacagcacctcgaagttcaagactccactgcagagccgttgtttattcgtcgtgaaggccttaccgccagaaaccaaggctcggaatcctcaattggagatctcagtgaccaacaatattgccaacatctttggtttcaagaatagaactcaagttacattggcgattgtggatcgagaccaatgtgcagcgtctcatgtcgatattgcctttcgcgatcaatacatggtccgatcggacatgtggagactagtcatgtcggagttatcagataaaatcatgtataaaggacaaaagatcatgtttatgggaagcatcaaagccactgtcaagaacatctttatccgagagaagaaatgcctttcgggatatttttcgccacatacaatccctattttccgaagcgagtccgccaaatatgtcctattcatccaaatgtcgaaagaaatgtgggactttgactcggagggcactggggacatcctcttcagtcgggttatcaatggtttcctaccggagctcttcaagcgatgggctaattcggacgccaaacatttggtaactattgtgctattcactcgagtcgaatatgataaacccaacactccaggtcagcctaaactcagcgctggaaacttgaacagcaaatttggaccaaacaaagttccaactcgagatttctaccgtgtggtagtaaatgatatggcaagcggccattggacgaccatcctagacgagctgaaaagggaattcaggaccttcttacgagatgtgtcaattctaaaaccggacgacgttgatcctgtatctggtatcaagaactccaagccaaacatggcgaccattgccggacacccaagttcagctctacgaggaaatattttagaggccattcatctcgcttctgctcatctggcttttgatcatatcgatcgcgacatggtccatactggcacctcgatcattgttatcacacccggtagtggcgtttttgaggtctcctacgagtccttggcttctacaacagaagcccttgcgaaccgaggcatagcaattgacttagtctgtttgagtccgatgcctctccattctgtgccacttttcaaataccgggagccagtggagcaaccttctggggattcagggggagctagatccagtgaagtgaacagggataggatgtcttctgagatacaccattccctttcaagcgttgtcagcagaacgtcatatctttctccaagttcatacctgtctgcaactagaatgagggagcgggcaacacctcaagccaaggaatggagctttggcatccctcattggcttgatatctcctattggaaccctgaaacgtaccgagagtcccggcgaatcttgaaaaaagacccaaatgcgccaatctctcttaccgtcactcgtccatcaaaggcattcacgccacgagtgcgtatgtatgagatccaaatgatgggagttatggaaagcgaacaagcaaacatcacaatcccctaccttactgaagggcgcggtggaacaagacctcgtggatcttggcccggctacaattcaggtagtcgcgctccccctaaaacacgtttcacgaacccttcatctttcaagggacaaggacaacttagtgatagccttcgccgggggtcctttgttcaaaacgtggcagaccaaaatgaatcgcagactcgagatacgcggagttcacgaaaggcagtgatgtcttggatggatcaatacgatgaaacccttttctctgtctctccaaatccgcaccagggtactaaagcgcccaaggcaaagcgacccagtgaagcggaagtccaggctgctgggggtggagtgcatgaacggttatctgcccgttctatcacccgccttcgccatcatgaaacgaatccagcagacgagaatgattctttgcactctggtcctcgaagaattgagtcgaatatgactacaccaaaaagcccaggatcggtcaagagtatgtctcccataaaaccagtgttgaaaaagacgccggtgccaatggcatcacgtatttctcggacaattagcttcgcacttcgaggcttgagcgctactcctccgagggccttggcaagcacagtggtaaatgtagaacatgccagtgctatgccgatgacaaaccaaagaactcctgccggatcaatttccgataccaggagcatcacttctttgagtccgtcagaaactgcatcgactacatcggtctttgaggtatttccgacgccttcaacacccgccaagtcgtcccaaactcccgctaagccgatttccatcaaaatgcctcccaaaaatccaccaaaggaatccgaacggccagaggatgcgggcccccatggatcgctgtcgatggacacgccagcgaatgaagtcggtcggggccatggcgatcctccgaacgatcacaatatcgagatcactctcagccatagtccgcgcgagctacatgcgcggagctccccgagcaaagctttagccccgtgggtccgatcggtcaacccatgcaatacccctaaagatgtgctgcgagatattagttggtttggtcgttggcaacatgcgtatcctcggcccccacatgtggctgtggtgaagtggaagagtttgaagtctcctgcggtgcttccattgacaactgaagaatttccgacagctagcgtgcttgcttcagactatctacagacaccatatcgtgtcttcccaaatgaagattccgaaggcattgaagcaccaaagacacgcggggtacttttacgagaaatgatctcgctgcggctttctcatggcttccaactcattgttggaaaacatgtggctgaagtttctgcgcagcccacccttgaatcattaaacgtcttcgatttccgaggtctagagcgcgatgggctcacagtgtttctctccaaaggcaacgcgattcaccgacttgtctgcctccaagggggagaagttgaagtgacccgctttacgcatcaaaactctgcggtgatcatttctcccaaaaagcctacctttactctttatcaaccggcgatgaaaacaatattaagcgcggaatacgaagtgaaggacatcaagctggatccaacctccgaagagtacaactggaactatgccgataattatgtggctggtcatcgagattatctccaaaatccagcgcagcagctgcaattctggcgagtccgttacgtcttgattccgcttcaactccatgccaattctcggcggaatttgcaaacttctcatgaggataacgaagaagaaattcatttgctgggtatcagccaactgacccatatttggcaacgattcaaatacgtgtcgccggaggaaaagcttttcgagacgtcaaatcccaagcgagaccagaatcccttgaatatcatgtaccaaacacgcaatccatcggaaatcgttacggcagagctggatcgtttgctactcactgatccagggctcgacaatgccccggctcagctcttgccggagtcggaactgttggacagatctagcattaatcttatgtcattggcgcaaattatccaaggcgaaaagggcgtccggatgatggaccgacggtggcattggaggttacattataattgtttcattggatttgaattcacaacctggctgttgcaaaacatacgtgatatcgatactcgtgaacaggcagttaaattcggcaacgagttgatcgatcatggcttgttccaacatgtggagaagagacacaatttccgagatggcaactatttctaccaagtctgtgctgattatcgtgtcactcgtccagagtctcgaggaagctggttccctcaacttaggacagacaaatcgatgccgtcgacacccgctatcgggactgtcaaggactctcctgccagcctcaaagctcgatcagacagcatcgacgagcgcataccacagactcctagcactcccaccaaggcgaagaataaggtcgccatcatgttgtccaagtccatgaaattcgatgttgatccgcgcaagcggtcgaatcggccggaagtgattgatcttcattgggaccgactacataaccccgagaattgcttccatatcgaactcagctggatgagcacgacccccaagttgattgaagataccgtgctttcttgggcttcgaccgcagacaaattcgggctgaaattggtacaggtgccgatcgccgaagcctgtgctatcgacaagacgcagccattccggaaaccctacaaggtcacactcaagatcccaccacccaaagggccattgcacactgtgttcaacaatgcgtcatttgcgcagccgggtccaccggatcgcctctactatcagaaggccatattgcgaaagtttgatttcgtacttgacttcgaagcctcctctgcattcccagcagacgttgaagtctcttactcctggggaaagcccgactacaagtacccgcagttcatccaccgaaccggaagcatcctcgcgcagatcaccgacgaaggtgagttccttgtccttgcgaatcggctggtgagcacccgcagcaccgcgagtcgagacgcagcccgctttgaaaaccacaatcggtccgacttccgaggccgtgatggacttgaccgcatctcgccccgactttctccaataacccggcccgttcatgacattggaagcatcggcagcccacttaccccagctggatcagcaagcctcgacgcgggaaacttgtaccgcgctccggaacacattcttaatggcctatctgagttctgcaacgatgcagcccaactagagcagttctactcggagtcgcatgctcgtccgttatccacgaaggtggaatcgactaccgcaaacctaatggatgcatcgatcccgtccctcgagcttcctgccagcgtagtcagtcatcatatcccactgccgccaggattaccatctcggatcacccgtgattcgcgcgacggactgatatcaccggaaattacacttgccagggctcgggcagaaagcatcagctacaatcccagccctaggagtggcagcttacgacccttgatctgaccattcgacgatacccatttgatgctctgatgattttgtacccaaatgaaatgcgatattagtaacaaaagttaccgtgaaaagaatttgattttattcgactctccacgtatcccgtacagattttacatattctgatctcgatttaagaggcgaatccaaaaatatccagcctctcgataaaattcctcatcaacgctaggccaagccaccatgcattttagcctgatatcagccattcagccgatgttcaaaccgcaccaatccaacggtgtctcccaccccgaggatttgcccccgccttatgtgctaccccgagctccagagaatagcggagctctctggcaaatgcgttattcagaatcaggccatcgcggacgatacgccgtgtcaaatggagcaggtctaccttcctcatggcgtaccggcgtaaaacaaaaagagcttggctgcccttcctgtcgttcactttcttcttttgtctttataagcatccaaagctgaaacgtagccatcagtatctggggtagcttgtgcacgaatttcaggaagaaggatatcaattggccttttctctcaagatgaagttcacctcggggatgtggtgtctgcaggtaattttcctcgcttctggttactgaatttggcatggaatgaacactgacacgcaatcggctggcataggatggcgtgaatattgagtggatgagcaacgtggaaagattttcagttgaacacgactcggtcaacctgctgttgaacaagttccaggcacaccgaggaaataccctcaattcgcgtgcgttttcaatcttcccttggtataggactccagaagctaaacgaaaatctatagccaccatctccgcacgggttacctcaccactggagggtgtcatcggcgtgaagcttgtccattggtaagtacctcaagggctcaaaccagagctctcggtctcggtgcttgttttggcaacgactaacagcatacagggctggccaaaacgacaacaatcctcactaccacctaaacaaaaccaccggacacaccaagatccagcacgacgatgctaaaaagaaactcaactacacaagcgggtcactcaatttggctgtgagcacctccgccaatgatctagccttggaattccaatctccagccagtaagaaactgacaggccaatcaccccgctctatcggatacgttcgcgaccagcgcactgagaagcatcgctatgatgacggcatatacgccgagcgccagggatatatgctcgcagggcttgacctcggcgttggcgagaaaatctacggtcttggagaacggttcggccctctggctaagaacggacagacggtcgatatctggaatgaggatggcggtacctcgtccgagttggcctacaagaatatccccctctatatcagctctaaaggatatggtgttttcatcaatcatccaggcaaggttagtctggaggtgcagtctgagcgcactactcgggtcaatatctctgtccctggcgaggagattgagtactttgtggtgtatggcgctacaccaaaggacattctgaatcggtatactgctttgactggcaggccggctttggttccgtcgtggagctacaacctctggcttactacgagtgagttcgggatattcatttgttctggaaatctggagaaataagctgacattgttatacaggcttcacgaccaactatgacgaagagaccgtcactagattccttgatgggttccgtgaccgcgacatcccactaggcgtcttccatttcgattgcttctggatgaaatcctatcagtggtgcgacttcgactttgactcggagatgttcccggatgcgttggggtatctcaagcgcctcaaggagcgcggtctccgcatcagtgtctggatcaacccgtacatcgcccaggcatcgccactatttgaagtaggcaagaaaaacggatacttcatcaaggtatgttccaagacactagcacacaagaaaaatgatatcgaagaaacaaccactaacaactcacagcgcatcgatggctcagtatggcaatgggacatgtggcaagccggcatggccgtcgtggacttcacgaatcccgccgccagcaagtggtacaactcgcacctggagcgactagtggagatgggcgtcgacagcttcaagaccgactttgccgagcgcatcccagtcaagggcgtccaataccacaacggcgctgatcccgaccgcatgcacaactactacgctctactctacaacaagaccgtgtacgagacactcagcgagcgggtgggccacaaccagggtctcctattcgcgcgcagtaccgcaccaggcggacaggcgtacccggttcactggggcggcgactgcgagagcacattcgaggctatggctgagtcactgcgcggtggactgagcctgatgctgtctggctatatcttctgggcgtctgatatcggtggatttgagggtacgccgccaccggcactgtacaaacggtgggtgcagtttggtctactgtcgacgcactcgcgtttgcatgggtcgtcttcgttccgtgtgccgtggatatatggagaggattgctcggatgtgctgcgggattgcgttaagcgcaagatcttgcttactccgtatattctgcaggaggcactgaagggccatggaaacggcacgccgcttatgaggccgcttttcttggagttcccagaggaccttaacacgtatgctgttgatacgcagtatatgttcgggccgaatttgctggttgcacccgtgtttacagaggagggagaggtaactttctatgtgcctctgtctcctgatgatgaggctgggaaatggatctcgtggtttgatcattccaagtcttatgagtctggtcgttggtatacggagactcatgactttgataccatgcccattttaatccgccccgggtctgttacggttaccaatccaacgatcaaggcccctgaggatgatgccttagagggaattgagttgctggtcaatgggcacctgcgtgttgagactacagtcgaaattatcaactcagcccagtcaggcgagatcttgaagactgtccgggtctctcctactgcggatggaaaggctgaagcaagtggtcacagtgtgaaattggtttatgtcgcgtagatacgtatcaaatagagaatgaaaatcatggaacgtatgtcatttgcatcaaattggtcaagagtcatattagaaaggtaggggaatagctcccacaagcggaactaaacctcagtatgaagtgtgtgggtatcatattcaaacaagtcgcaatgcaagatgcaaagtcgaaaaacaaaagaaaaagcaaagaagagaaacgtattcaaaagctcgaagcctaggtctggtaccatatcgggcaagaccaaatcactaaatgctggcaggcgaaagaaaaagaacaatgcataagtgcaataggcatggatatgcaattagtaaacgtaaaaagcttggtaaagcagaatcaccaaacttcttcaacgtcaaggagccactttcggattccttcacgcaacgtattatcagcacctgatagtgctcttctccgctcgcggtcggccagcccgtgcgtgctgtccacatcttcacggcagtgttcggcggtgacaaggcggacgacttcttcgagggccccgagcaccatcttgcggcattcaccacggggcacttcaaggggaggggcttcatcgcctctgggagacggacccttatcttcagctttacgagcgcggttaggggaaggggcacgcgactgttccattgacgaataaccgctctgccccaagacacgctcgacagcatcaactagaactccgtcgagatccatcacaggctcctcgatgaaccgctcttccacaaaggtctggtcccgctcatcagtgacggggccgtggttaggtttatcatgtccagaaaagaagctggtgaattgtgaggctgatgtacccccacggggggcagcgctggcaggcgaagaaggagtatgaggagtcccagagctgtgacccactattatcttacgtcgcaagcggagtcgtttcaccgtagaagccttagtgtctgcaatcaaagtcgtcgcaacatctacccatctcccattcatatccgcatcggatgtgaatgggatgtatggggatggttcagcccgcattgcctgtttgatttctgcttcaagagtagcgtaaggccggaccgcctggagcgagaaatcctcatggaaattcttcaaccaaccagccacatgggcagtcggtccatcgctgtccttcatagtaccggggaacccggagccactgctgtgcgtagaagcaactgcatccatgctggtgacggaggttcgagtcttctttggcgaggcaatcgttgaatcaccggacgaagaaagtgacatgaaaccaggaagtggaaggtcaacatccaccacgccttcctctgctcggactgacaacttcaaaggcgactcccgaacttggctggtgagtgatgatggctctggcgaggcagtctcggttttgtggggagcagcgacagatgcagttggaattgagatgtttccactaggcgctgtttcgggccggtgcccatcctcattttctgtgacttccttgaccatttgagtcaaagtggttgatccgcgtctagcaggaccagatattgtagagacagacccttttcgagcttcggatggggatggggaatatggctcgctacttccggtagatgagccttgacgggagctccaaagaccggagaaaataccaccccagcggcctccagccgaggaaatactgccgtttgtgctcgctgtagagctgtcacaccgttggaggctctttagcagggtctctgatgctaggctctcgttgccttcggctgcactgcggtccgctctagcctgacttgaatggcttggctgagaagtaaaatggggaacaggaacagtactgctctgggtgatcatagaagtagttgcttcgctcgtattcatggcccgagcatccttccggtgcatatttgcacccgggggtttgatagagcgagcatcagaccctctgcgggccgaggctgagttttccgccgttggagttatttcagatccatctaacgaccgctgagctgtctcctgagacgaaacgctcactgaccgctggtggtaatcattatcgcccatgatcattcgctgagcacgagctcgtctatcgatcgctctccggagagactcctggcggaggataggtacagtcggcgggctttgagagatagcacgcagggagggcgatgtgccaggcctgataggggaaggcaatggctccagccgttgtttggagggcaagaaggcggctagtaggaacacgagacgacgagcagtcatcttatctgggcatataatgactgttctgtttgcaagaatgagttcgccatcctgctgagctttgtgctgctggttgtggcggcgacggtaccactccgggccaaggctgttgagccactcggtgtgattgcccaaaaatgctgtcaaaaccactaagaagaagaagttctgctctttgtcgcccaggccacggacaattgaacggccttcctcccgccagacgccccagcgactttgtccagtgaccacatatggggtttgaagagcgagggcgatccggcgagagctgcgaatagcttcttctttgagcttcgaattgaccgatagaatgttagcaggtaaatgcacaatggtctggttggtccgctgcatattgggatgcttcgcaggctttgggtgtggcccggatagagagtccaccttcttcaaaagaaagagaatttcgttgcgaacaagtctttcgagatgggagagtgtacgagtgatgacgtcccaatgatcaactaataagtccagacgctcgtccagactagctgggggagaggcagaagatagactatcgtcaaagaatgcaccaggccagcggtgatcggagtccagcgagcttgaaaaccgtggccgaggagaatctgggcctggagtactaaatcttgagacaggacgtccattgttgcgtggcagcaaggggatctggatcgtaattgcaaccgcgtacattggtgttttcttctccttgatcttcttgcgcttagaaacatccgggaatgggaactccatctcgggcaatgactcttggtaaagagcattggcgtagtcatgtcgttcggccgacgcctccgctccttcgggaagattcacactgaacatgcgagtcaagagaaccgtgactttggaaggtggcttgtcgtccactcctcgggctcctatcggagccgagggattccctgcggtataggcccgggaaagtggactgccggtggcggatgctgcactcaccccggttgccgggctttcatcagcggaaattatgtgcattttggtagacgacccccgatagctgaaggcgctgctgccgaagatgcagttcaaaaggccggtatcattagagtcggaggagtgtcgcgatgagccaggatcatgccatgtccccggtggtgccaatgtagagctacggcctcgagcacgggaaaaggcacctggaccgcccggtgacgaccggcgtgcctctgcagctgcggagaggggactcgagtcgaggagggaggattgaggattgcgacgagttccacgagaaagacttgaggctgctcgagtatgtctaagacccgcctggtcgttgccttgtgggtcgattccaagaccggcgggagaagaatcggacgcacgagtgtcaagtaagacacatgcatctcggtcgcccaaagcattttgtgcgacaatcacacggaaatctttgattgcatccaattccattcccccacgatcatcatatgcaccagcagtcgaggcattcggagaattgaaagtcgtctgcaatgggaaggcatgggtatgagaacgtcgaaggaggctggcgtcggggaaaagaagaccggaggtatgttcctcttcggtcacagactcaagaggcgttccattgcttcgtccagagtatgtcaccgggttcagagtcgacacagcgctactcaagagtcggccaatcatgatgaatgagaacggggaaacccgcagagtgaacaagtacttagttgtagggatagaaaacgggccggtcgaattcacgtagtgtaacggtgggtatcaggcagctagggtatctaggctgcatcaacccatagcttaattcaacgaagcaagaatcatcatcgaactatgagaggaattgagaagatccagagttatgggaggggagtggaagtggaaggtgggatgaggtgcagcagtggggcttggatcagcaattatgaggtagaaattggctttgcacccatgaggactccacagtctaagcaggatcgtgtggaaggcaggaggttcaatgaaataatcccagagcttctctaagggacccagttgctggaatagagaatccagcagagcaaccaccggggagcggaaacgcgaaagggcggtgaagcaagtcacatgatatcagcctcatcacttacggtgaccgatagtgaacattttggcagatgtcttttttctcatataacatcgatttgattctgactctgatagatgccctcctagaaacaaacccgatgtacgacagttagcagtataagaagagcctattttgatcaggtattaccggctattgggactacatccaacggtacccataccaaccactaatactagccaccatgtcgctataaactaccgtcatcgtgtcaccgtatagtcgggtttacaaggaatcgtgttactcggaggcgctgatttgtgtgatttccaacgcatatgaatttgggattggagggaaatgcttcatcttccaaatactactcatgatcgacacatgccacctctacaccgtcactcatacctcgtgtgatacaagcatcatgcctgcaaccccgaatgccacacctcttgacatgctgtaatcatcatgtttttttttttttttcaattccccgacgtgttcgccgttccatccacgtgtttctgcgcttcagccggttctttttcgtttttccgttttcgtcccctgtagtaaattgacacgaggcgtcacattgactgtcagctattccatacagcatgttactatgttgtagcatcttatttgatattttcaatctacatgtgtaaaagaattcatagctgaaagttcaatttcgtttattgaactcggtgtattaacttccaaatcatttcagttctattatactctcagtgagaacgcttgacttttgcgaccaatcgcttcaactcctcggaactagactccttggaggacttcttctgcttcttcttgctatccaggttctctgttggagcctcagcctcggcatcatcaccggtacgtcggcgcttgcggccctcgtccaacagggccttcatgccagaagtagacttgaaccgaggattggtaggatcaatggcgaaatcatgagtgtcgtacagacgtgagaaacggggatcgctgacattgacttcaaagtcatctgtctgggcaagttccaccttcttgcccttcttgcccttgcccttcttccgggcctgtttctcggccttttcaatctcgttcatgtcgaagtgtttgatgttgatctttttgtcatctaccatcagcagctccaactcagctcgttgggcagctgacgcggcttcctcggcagcacgctcctcacgcttcttgcgcctctcctccttgcgtcgagaacctgctgtggcctttccatcggggtcatcaaagaagggatcattgaatcccatttcttcttcctcttgctgtggcacctcggctgggcccatcttggctggatcagcttcattgtcttcactgtccgcggcagcgccatcctctgtagatgacttggccttgagtttctcctttcggcgctttttgcgctcacgctccttccgcacatacttgtcaattgtgctttcttcgatctccggttcattttcgaagatagtatccttgccatggccgccagccaagcccgatgtgaaagtaacctccatctcgccaacggggcgttcagctctggtgcgggtaggctcgacgctcagacccagtaacgcacgcatgcgctgtctctcggcctctttcttggatagctttgtggttgtagcttctcctgcagtattatcgacaacttcgacgcctccgtcctcgtcatccgattcttcgttctcggaactatcgctaccgaggtaggctttcaggtcattctcgtcaatgtcctgacgtgagccccggaaggcacgtgcctgggcttcttttcttgttttgtcatccgcatcccatgtcaatttgaccttgctgtgctgcaaagcatccgttacaaactcagtaggcttgtagccgtcggggatccgagaacactcgtcccgggacttgtcgtcggagaagtcagtgtcctcaggcacgaagcgaagatcgaagaagttggcactagataaatattcaacaccatccaccagatcgtagacatgctttgcgacgtcttttgatgaaaatttgataatggcgtagtaataccgcagtcggtcgagctgataccgccgtagctgtgtagagttgaattcttcaccatcgtcagccttcaacatggacttcttaatttcctcctcctcctcatcagagtcaagttcctcctcttcggactcttggctggtgttctttttcttcccagaagcaaaaatctctttcggggggccttcaacctcctccctctccatgcgctcctttccaaattcgctagggtagactgtggcgttcaacactcgccccccagacggaaggaaactggaaaagactgccatcaagtcctcggcacgaatattttcccaatcgaggttgacaacagctatccgatccgtcacttcgccgagtggcacatcggaccgttgctcgtccgggaactcgatcacatcctcgtccgcctcgtcttcttcttcgtcggagctttcttcttcagatgacgaggactcaaagccgccatcacgggcaggatcatatgaagcagcattgacccgtttcaattctttttggacatcttcgtcgtcgtcggcactgtcctcatcttcgtcttcatcttcgtcttcatcttcatccacctggtaaaactgcttcaatttttccttagtgtcgtcttttctaagctttcgtccatagcgatcgacaggagcgttgctggagaaatccttatcgtctagcacatgcgcaaagcgcttatcgagtttgacgtgagtctggcgtttgctgggaagacggtagcgaggatcggtctggatgttcgcaaatcgaggatccgctacagagacacaaagagtcagtaatcatggtcatgaggtttcctgaaaacaaagtcttaagcttccgctggacgtactgattgctggaccggcttcgcctttggacttgccagccttggactttttcttgtctgagcctgccattgtgagcgctaggaaatttcactttgcataccacgagcagcaagaaaattcttttaatgcttgagtatcaatagatatcgtcggattcagcaagtgaaaatagtcgagaccaataaattatttcttttttttctgccgtcgaagtcagggcggtcaggcacgtgtattctcaaaatggcaagtcttcttttgactttcccatgcagaacaacttgacaacataaattgtaatagtatctacttgaacttgagtaaatctgcaactttttttataaatatgcttttgctaagtgacaatcctaacaacccaatgcttggtctctaagataaatcataaggggtggatcaacatatatacttgaagacgcaacaaatgaatgaatatttcagcatccgaagtatcgcttctctatccagcgcggttctccttcttcttcgatacgtccaacaatcacattgatcctagggtatacggcagtgagcctcttaaggccccgttcacctgctgcacaagttacgaaaacgatcctcccttgttccaccccatgatcaatcaagacgcgaacagccataagtgcagcacctccacttgacatctgagagtcaattagtatgacagttgtatgctcttcgatacgagacggaagtttcaagtaatgcaactccggctcctcgttgctctcgttcgtttgaatgagcaaacgaccagtgagacagtcgggaatggatcgcttaagcgcggtctccatgcaagagcctccacgtaagatagccacggctgatacgatacccttggggtgcaaaccgaggtacgtgctcccttgtggtgtttccacatttgcggatacatacgatgtcatatccagggccctgcaacagtggtgtcagtaaagcaactagaaggcgctatgctcacaggactcaagttcttctgtgggcgtatcgttgggaattgggagcatgaaggagcgcagtacctttcaatcaagatcgaaaccagtcgatcaaagtaaaatatgaaatcctcttgctgggtttctggggtctgcagaatagtattcatgccaataatctgcggtgtcgagggcaagacgtgtacatttgaaggcagctccacttctgctgcaaccaaacctagtttgcgaagcgcttcggtatggttatcagatttctcctgcagcttgcgttgaatgtgtttgaccaccatgtctgaattagttagtgtataggtctcaaaacgagcagctccaggggttgcacaccaatagcggtcttgttctcaatgccacgcgggataatgatgtctaggattcaaaattaacaatggtatcccaatgctttgtaaagtcatatggctaccaacctgagatagagcgttgaggctccacaaaacgagtgtaagaaggcttcacaaattcaaaccattgtttgatgattccttcaatatcccgccctcgctcacggacgtcacgcaagactatacattgtcagctgggttcagtagcccggttgagataacttacttctgcgacctaagcacacatccatatctgcttcaacaaagatctgggccatcaaattagcacggataagcacaatgatagcacagaaactataataccttcacatccaacatctcgacaattctgggatcatggagcgccaaaatcccctcgagaatgatcacatgaggggagtagagggtggtcgtattacgctgccgctggtgctcagcaaatgagtaaattgggatgttcgctttctttctgtgtgatattcagtcaggtcaaatagaaggactctagcaagaacagtaaatttaccctttcttcagatcacggagggtttccaccagaatatcaaagtcaatcgattccgggcagtcgaagtcatattcatttgcgtgggccttgtggtgttgctcaggagttaaggtcttgtaaaatgagtcctgtatagaacacattagaacaaggtctcgatttatatgcagttcacaagctgtaccattacaaggatcaccacccacggcaagttcaaagacttgacaatctccattgccacagagctcttaccggagccagagctgccagcaatgccaataatgctcaagtcctgccatggtggagaatatcgcacttcggtggacgaagaaaataaaggcgagattgattccatgtctacgtgtgcgacatacaacgctgtactttgtaggtatcttgaccctctccacccctctggtttcgattatgacagcttgaaactgtccaggtggggagccccgggcccacgataattacctaatctctagtcccagagcgggttagtcgagggccatttcctggaagttccaagattggctgctcacgtgctgcttatgtcagaggtttataatcaccaatttcggcctagcgtgctactttcgcttaagctacttcttccgccgcgagcttttcacttccttttctctttcgcatccaactcccacacagcgatttgtctttccccatggctgtcgtctcttgggttgccttccagctttacggatagcttcagatcagattcaagactggctatctagaccataatgtctgctaatgttgtatgcttctcggcttgacacccgtggttgctggccttttaacacaatgcagatgtctcgcacttcgtcgactgcgacgcctacatggcatcacttcgagcggaagctcgaagaggtcaaaccatctaaaacgtgagtgacctctattccatccccatccgcctacaccaccgtgacatgatgttcttgaaattaagttgggaatctctctgaaaacatgtgaggaaaaacaaatttgacttatccttctgattcacgtcaccactgcacaattttcattaatccgttgaatcaatggttactgacaattacaatgcagcgatatcaactatttggtcatggattacctcatcaccaatggctatcccgctgctgcgaagaaattcgcagtggaggccaacatccagctcagaacggatcttgaagccatccaagagcgggttgaaattcgcactgcgattcactctggtgatatccaggcggccgttgaaaagatcaatgagctgaatcctcaggtaagaaaatttttcccactagtctacttcacatccctcggccccacttcttgctatgattatacggagtttcatgcaccactcttaaattcccttcggggatatttgcagaaaaacaaacatcttcagtcctcagtatgagcaattgccaaatattgaatcttatcagcatatcacgcattttatgtcatgtgccatggctaacaagacttcaatagatcctcgatgaagacccgtctttgcacttctccctcctacgtctccaactggttgagttgatccggacctgcatggacacacctggtagcgatattactcctgctctggattttgcgacggcacaacttgcaccccgcgcccctacaaaccctcaattcttggcagacctcgagcggactcttgcccttcttattttccccagtgataaactggccccatcgcttgcgtcgctcctggaccctgcacttcgtaaagaaatcgcaacccgagtcaacgaggcaattctgcagaaccagggtgctcgtaaagaggcccggctgcgcaatcttgtgaagacccgggcatacgccgagctcaaggcacgagaggccaaaaaagacatcccagataccttggatattggcttggtcggcgattctcacgacaacagtaacagtaatgaccttgctactaacattcgtgacactctgatgtcgaacaacagcgacattgatccaatgatctcctgatccaacttgcctttcaagctggccttgattgtcacttatatccccctattttgtcaaggcaggatctcctcctttttggtccctcttctagcgcggcgtcttggatccacatttctaggtgttgggcgatggtatctcactagctctaataatatgggcgtttcgacgatccctttgtaatacaaatggctatttcaatatttattttgaccacctatttttctcctgaacatggtagttttgtactccgtagcgtaatatcacttgattatatttgaaaagctccctggtggaatggatgcaaacaatgcattgatgtatgcagcaacaaccagtgtagcaagaatgatagctatcccacgcaataaatcaacccacaatatgaatcaagagtggctatgaaatccgataaagcaacaaaagcaagatctaggagagatcttaagcaaccaaaatacccccgggctcgctgcctgccgaatattgaagatgaaatctatcacaaatgtctctagatcaacaacaaatgacaggacacatacgaggcaaaacaggcttccttagaagctcatgagatctggagaatagaaagtattagcaaagcacgaattttgatagagaaataatgagaaagtagaagacatacctcttccaaagagcgctctcttggcccaatccatggccagcatgcatcgcgtgcggaagctgacactctcagcaaagtaaatactacgccaaagatacatagcaatgacgccaccactgaagctcaaaccacccaagtcaaacacagcagcattgctgatgtacgccaggcttccgaggtgcttatacttgaacgccttgtagacagcctcatcgaggtcaccgtagtcgacctcgttggccctgagaccgggaagcgcggcggcaatcttggtcagtttacgacccaggtacacaccctgttgattagcgcgctgagcagtggcgggcagggacgtgagcttggtgtcgatctggtgcaggagctcggaaagctcgccgtagtcaagagtgccagattggtccttgtcgtatagctcaaagagcagatccaggcgacggagatgatttgtggcttgcgggaagcgtctcttaacccgagcggcgaattcggtccattcagagaaagtaaggtgcactttttcggggtcgcggcctttctcccaggcaacggtgcggaggaacctgatgatgttgtctgcaatgttgttctggactgttgagcagtcgccaattgcatagacgtcgcccaggggagcgccaatcacgcggagatgggaatcagtttcgagagcgtgcttgttgttttggccttccagttcattagagagtttttctgagatctcggctcgggctaaagagatgttgttagacctagtatattgagtaatggcgttagtgcactaaccaactccagtggaccacaagcagaatcccattgggatttcttttacaaccgtcttgccctcttccacctgtgagaaaagaacccggtcattacgcacttccctgacacgggcgttggtcaacacctcaatgccatcgcgagtaaatcggctctgcaagacgtcaatatcagacaaattccgagggggatgtagagaaaacatacctcggcatacttagagagtgcttcgtcgtaagtgttcaggatgtgggttcgactttggatgatgtgaacagaaatctcgttccgtacaatgcgagggaaagaatgaagcagatcttcgtttaagagatcgaacagttcggcagcgaattcaacaccggttgggccacctccacacaccacgaaagacagcaggcgtctgcgctcttcatcagatgtggtggggaggcacgctagctccatattttctagaaccctgttcttgattcgacgagcgtcgtcaatcgtcttcaggaagttacagtgctcaaggcctttcacgccgtgtgggtttgttacacagcctagtacatagacatgttaatacatttttgaacatggccctgcttgttctttgtcacaacgtaccgactccgatgaccagcttgtcgtatggaagatagaaattttttgtctgaccatcttggccaacctgggatatttccaccagcttcgcagagaattcgacatcaaccgcagaagccttgaggaagtgaccattgacccggtcgataatgcgccgaacgggctcaaccagcgaccgaagacccaaagttccaaccgtagcagaaggcaacatgggagtaaacaggaagtagttagtaggtgaaacaacagtgacatggtaatcggcagggttcaagttcttaaggagcgcgacgctaccccagcccgttcccaggataaccagacgaggtttatccttctgccgaagcatagcttccgagtcatagtcgccaaccagcacatcggcaatgggcaggttcttcgggcctccgattcgaggattgagagccaattctgagaccgggatgtccgtctcttcggaacctgtgcggtatgtactagcatcgtaaacgaagaaggcgacgaccacggtgccggaggcgacgacgaagaacccgaagaatgtaaacaccttgcgtagagcattaatagtacgggaccctgccaaacgttcgactttagctgcggtttctgatttgaatcggacccgcatcgagaccggcgccaaggctcggcattggggggctgggcgccgatgaggagtgtgtaaggagcgggacagaggtcggcggaatgtagctgatggtctcgaggcaggaatccgccctggtaatgcccctatcgacttcagcgcggcggcgtccgcacgggtccggtgcagcatcgcgttcaacattgtcatgggaggttgtgtagaggatgttcaacgatggaaaaaagagccgaagcagctcatggtccctgtacactcaaaacacgagcgaccttgaagcaatcgaaccaaaaagagtatatctcacaaaaatttatgaggatacgacaccaactatcaccggcgacgtcatcgtaatggatgtcacgtgccaggagctactcgggaacccggcatcaaaactctgaactcatacgacagtgccggactcggttgtagattcaccggcaactatatctagataagtcgatcttctgtgtaccaatggaaatgaatccgtggaattctattatataccaataactaatcggagtggacatcgggccgagctcgaagaaagcctcaaaagcccaagcgcatgtatgataaagagcaacatagcaaccacccattccggtctcggaagttaaaataaaaaaagccattccccgcgggatgcttcatgtgcagagggaaataaataaacgccgacctcgcttgacatgcaaaaaaaaaaaaaaaaaaaaaaaaagatttcccgtgcatgatggatgatggggaaannnnnnnnnnnnnnnnnnnnnnnnnnnnnnnnnnnnnnnnnnnnnnnnnnnnnnnnnnnnnnnnnnnnnnnnnnnnnnnnnnnnnnnnnnnnnnnnnnnnnnnnnnnnnnnnnnnnnnnnnnnnnnnnncccgcccccgcttgacatgaaaaaaaaaaaaaaaaaaaaaaaagatttcccgtgcatgatggatgatgtggataacgcgagctcagtctcaatctaggtcctcgtccggctcagcgctaggcttcttcttaccggttgaactcttccggcccttgagccgcttgctgaggttggagctggagaccgagctcttgcgcttcatgggccgaggagccaccgtctcgtcgagatctccaacagcgtccaggccgtccccttctgcgtcctcgtctccatccaccctgaactcctcatcgatggagagtagggttgcaaactctcgacatttttggtgcatcgtttcctcgttgtctagggctgtcatatttcgggcaacggcttcccagaacttgtcgccggtcacaccgtgcaccttggtggcagttttattgggttccttcgttgcaggtttcccttctttgttcttgctctgggaatttattccgtagagacgacgaaggtaggttcgagcttcccaaagcattgacaatgatgctgcagcagttgccaacaatctcaatgtcgcagggttcgcttgccgcggtgtgattgtcgattgaggcatctcaagcgcaaaccctggcatcatgttatttgaggcatctgcgtctaactgaggtggaccgattggggtgggggatatgtctgtctcaatcgcgtgtgcaataatagtgcccgttgaagaaacgatacgctccatacacgcgatggttggcacaagttcggccaattgaccgtagtcgaaaaatgccaggttttgggagatgaagcgtgccagtagaagatgttctggggggttgccagttacatccaattttttcggatcgaagttgactttggagcaaaggttcgcgaggaactttttctggtaacggctgttgctgattttgacaatttcaaacaacggcgcaagcttcgagacataaggccgaggactggcgccgttggagtcgccaacaatatcacgttggtaatagaacgcctcttgcacagcccgcatgtattctcgctcaaacatggattcatactgttggtggagcattttgtgcgtgtcaaacgcgattttcgcaattgcagggactgtagaagtctccagagagaccagaacgcccgcgcattcctttgggtgcactaagccctgcctattgatactcgcaatgagttcaatagcagtcagtgaatacgtatcctggcgcgattgtgccacctgaagcatgtttgagagaaagttttgggcgatcaaagcagcagcgccatcattgtcgctagccctcaaggaaccacccaatctggtagtgtcttcctgagcggcggcttctgcggttggcatgacggccttttctgacttgccttcatggatagcaaagaagtctgcaaaagatcggagaacgatgttttgcagacttggggcatcttccttgaaaacctgagcgaaagtctgccgtgtgcgttctctgccgaattgaccaggccaagactggcatatagatcccaggctttcgagagccatgaccctcagttcaaagggtgaattcgatgcaatgaagggaataatagagtcaaccattagccccgcaaccgagccaccggtccaggtggggaattcacttttgaaatgagatgcatacttctcaaggtcgcaatgccgtccaacacaacctgcaatgcgaatataactcttagcgcgacccaggattgcagcatgtgtaggcgaggagagatcgacactcttatactgttgcaatggtttcagtactgaaactgtcaatttcaccagtctgttcgtattttgcagaacactgttgatggtccacaagcaagccatgacttcgttcaactccgagcgggagagcttagcaacactcttgaaaaggtcattctgtacttccttgagaagagtgttgtgggacgaggataaaaacggcaagacgcagcgatagataaccacaaccgatcggaataagaaaagatcatctgcggtagaaaggtgtccgatgtaaggatgcagggcctccagctggtccgaggtaaacagcttcgcattcgacttggcaaagacggtgatcgtctgcaaaagagcttgctgggataccttgcttgatccatctgaatcctcaaccagtctctcgaacatggtagcgaccattgccttacaaactttgaagttcaatgccgccgacttggatttatccgaaagaaccgctttcagacagactctaagagactctagggcagtctcactacgctcagtcagaccaatgacgaggcctacctgctctccaagagccattttcagttttggcccttcagacgaggaatcaatggattcgtggaacggaacgagccatatttcttcgaaggtttggcgagccaaacttgccacgctctcctcaagatcgcctgtgcgttgaaggaaactgtcgagaatggccaacttcagttccttccgaggcgttttgtggtaaatgtccttcaaaagtccgatgcagcgtttgcgaacaccagctgtttgatcagctgcacatgctaaaatgcttcgacatccttcttcttccagcttaggctttagaccaatgcattgtccgatcaactgtaacgcggagtcccgaaccataggtgaggcatctgtcgtacaccgatgtataacgcgcaaaacggaaggatctctgtcaagaaggttcgggtctttctcgagcatgtagatgacacttttcaagctgcggctgcgaaccttggccgagtcaccaaggaaagaggccaaaagaactttgagaatggtgtcgaatgctttgccgaaattggaatttaaaaccgtgaggatataggcaaattttccatgcacgttgggaatttggtcgaattctttatgagtctccaaccagcgtggatctgagaaggacattgtcaaaagagtaactaagccatcagtcacctcgtcatgtgcaatttcttcatggttctcggagttgtaatatagggcgcaggctgttttggcccattgagccaagtagtagcctcgcgcgctggtcagttgccaattgtcggaattcttgtcttgcaaaagatgctcgagcgcaatcctatacgggcccgttggagtgatgaggtcctgatgatgcagtgcgccagaagaaaattcctcgaattgttgcttgaggtaatcagtcaattcactgtcggaatcttccagagccgggagcatgtgctgagcggttgctatcagatctgagatagcagaacccatccagccaagaagctcaagcgccatgctcttcgcagtcgcagcgcttttatcttggtcggtgatctgaatcatgcgtaaggccaagatccggagaagcaattctgcagccggccaatcagccgagcccagtacattgatcagatcttgagtgaaaagatccagaatattccgatatggctggtcaccagttttcgtcgagttcatagcacgctgaacgatgaagttcacaatgtattgtgcagagcgcatggcattgtcatagagtcggttggccttgttcgctaggcgttccaatgattcgtctgactcgccatcagactcaccattagcatgatcctcgccattgcccataagctcatcatcgtcgtcatcggcttgtgctttgattcgacgtttgaccttcggtcgcgagggtatctccaacgcagttgtctgaacaagctgcaagactagcgcggtaagtagttggatgttttttccatctgcaactttgaactgccgggcattctgacgtgtggtggggagtttctccagtgagaccagaatctcatctagaatgaacggtcgctgctcagggtatttggaaaacacctttgcaagcacatccatcgcaccacgtctcgcaggctcgtacttctgatatcctaaagcggagtctttgtcattatgcgcattttccacaaatattagctttgcagcaaagaactccgcggccgtgatcgccccctcggagacatcaatgcgagacagaaagtctgcaaaaagagtgagaaccttcttgctctggtgaacaagagtgctaatgatccgtctctgggaggaaaagaattggaagtgctggctgtctttgccaccaggacgagattccactgcgggaataatgcaatggtcaaatacttgattgagaaccgtgggaatggcctcgatgagatcctctggacaaagatctcgctcagtctgacgcccagacatcgtctgcagcagcgttccgattgcaaatagtgcgttcaacacatcctctatcttacccagccactcctgggactcaagctcaccgaatgaatcgcctaggccaatgtccggagattgtgcagcaataattggcttttcgcacaatttttgaatgcggttaagataatcagacggtatgtcctggagtcgatcaaaccctgcaactttccgaagggccttctgcaggcgagtgtgagcatcagatgatagtatcaatccatgaacttctaaagattttgggttcacgaaaattggattcggcgtgtcaggggttgggggaatcgaagtatcgggttcgatttgatcttctgcttcaaaaatctcgtgtagaagatcttgaagcttttgcaaggctgcatctgcttcctctttttggtccttgagtcgtaccgccgccatggcgtcttggtcatgggcttccggtttaggcttccttacgttcgcgtaatcgctgtgttgttgttgtacgggtttgattggaataacgacggacagttgactcgatgtaagaggaggattcagctcaaaagaggccgagaaaggtgccgagttcgatttgttcgcaacgtatgctcgctgattcaatgaagcaactgtcttcggtgtgaggtctttattttcgggctttgtctttgagggtgcttcggggtctgcggccggtcagtgaattgactataaatatatctgtggcatctcagagcttacatctgaatgcaatgtcggtggagttaagcaccatccgtgcgaaggatccaaggctattaagaccggaagtagcaccgtcaggatcgtttgggcgcaactgttgacttcgcgtgggaacgcgaggaagcttgaatttgctatggaatccaaattagttgactgcctttcaaatatttcacatctccttacaattctgtcagctggtctccatccagcaactgttggatatattctcgagacgtttctaaacgactagactcgtcccgtcccgtttgcatttccgtgtcaagtgcacttagtgttttgcggccttcttggaggacatggtttatagacgtggtatttgaaggccggccaacatcgggacgtaggatgcagtctgtgaatacaagctgtcagaaaaatgagcataattgaggagcgaaagaacgaaccaaggccgaagacaggtgcgctggacatagatgagtactgcaatgcttcatccacagatagcgacctttgattctgaaactgcatattggaaccatatggtggcatctgatcatggccgctgatgaccacctgaacggcgggtcgtccattctggtccatggtcgcggttaagttaaaagaagaagtaggcgcgagtcaagttgacatgctcgtgatagagacatggcaatgaaggcaggcgccctatgacatccctagatcattcaagtagtttaaaaaaccagaatctgaaagaaaatgagctgagctacgagcaactgcgttaatgaattccgtatgggtgacggcacccctattgccgtctgtgaccgcctctgtggaggctcgtgcatcaaaaaaaaaagttgcatagattattcactgcataaggcctgtttcgttatcacttcgcttgcaccttgatcttctgcagtatccagatcgtcaaaaatacttctcactcctcaacatgtctgccattggttccttgattttctgcacagattgtggtaatctcctacgagaatctaccggcaatgcagatgcgattctacactgtgatgtctgcggcactcggaataaaggtatgtgactaaaacccgttattcttgccaggttgatagatcaatcattgctaacttctatttacagacacaatcccccaaacaaccgtgtcccagtccaagccctccgcattcccctccgcactgagagccaaactatcggcagtccaggtcctgtcagcagaggatcggaagactgaggctatcatcgaccgtacatgtaacgaatgtggaaggaagcagatgttctacactacggtacaactgcgcagtgccgatgaaggaagtaccgtgttttacagatgtgtctgcggattcaagtatgcccacccgcctcaaaagcatatatctatgcatgcccaacaaatactaactacttcaacagggaaactaccaacaattaaacttggagtaacggattgtacaaaagatgtggggaaagtctatttttggagaaaggctgtataactagcgggacaagagtattaaaatcacgaccgtcacgagacaaactttttttttgcaggatctccatcatgcagcaacaggtgcagcgctatccgggatcagcgcatattgggtttcgccattcttctcaaattctgccatgtcaagagcaacgatgacactgtccctgaccacctgatcaggatcattcaaaaatttcttcaaggtctcctccacaccctcctcctcgcccaggctgccaagggcctccgccgcttcgtgtcgcaccatccctacttccgaaaggtcactcagcgaggctgtgagacttgggatcgaggcagggtggcagagttgtccgaacacaaaagcaacctcatggcggaaaagagcagagggatccttgaggcccttagccagcgcattgacggcgtcgactgccgtaggaagatctggtggcgaggcaaggtcgcgcaggccgaacatcgcacggtacctttggaacagaggaagctttgtgtcaagcagtgtcttttgcaggtcgggtatgcagggttcggcgctggcatctagaggcatgggtggagcagggtcgatagacgtgaaatcactgtaaatcgaagatctcaatgtcagcatttctcttcatggtatataatctcccgcgcagatcgtacctaggcttcaatttctcggccttgcgctcttctgagttctcccacaagattcgatcgacagcaatgtcgcaagtctcccgaataatctctagttcattcgtatcatccctcaatttcttgaggatatccaagctatcggcgtatccaagagcgcccagcgcttcggcagcctcgtggcgacacatcgcatcctcctcggtatctttcaccacatgctgcaggtatgcaacagactcgatgtttttggtttggccgagacagtaggcaagctcatgcttgagtagcgccgagggtgatgcgaaacctgcggcgatcgcttcaatggcggggagggtctggtctgtggtaggctgtaggcaggccaggtgcttaagggagaaaagagcgcggaagcggcgagcaagcggctcagattcagagaccagcaccttgcggagagtaggaacggtattgtctatttcgaaacccattttgaggagtgtagtcagagggggagtatagaggtggaaaagaaaagttgttaatctttttgatcttatcattttttagagtggggtggcggggcccattcaggcgcatggattttggatttttgctcgtacgttgttgtttttaatgcttccggtgtaagcccaagacataattgttgatagttgcagattagactacctaggtacccttacagctcataatcatgtattagtgtaggtttaagggtggagtatgcgggctctcgcagatgggagcgctgatcttaggagatatactgtatgctataaaaacgttgtatggtgtgcaaatgttccacatgtatacttcagtaggatgcttgagctttaaaacaataaatgaccgagaaaccaaatagatattctcacaccgattgtacacatatcacgagatatatagacgtcccaaacttgtagtcacaactggagtagaaactcggatggattagtttgaagcactatataagtcaatctagcctttatattatatcctttagtatattgtccgtgtgttctctgttcatttagcaggatacttactgtaggctgggatccgaacacggctgttttgataaataccagacagttggagctacaagtattgatcaatagacttgcctagacacctttccaaggaaataagacataaataataaaaaattagcaaagtcatgatcctagagcctcacatgctcatcccattatacaatgctgttgactgggaatttatagcctgagtggaagctctatattatacatcgaggacactatctagttttatactccgatggacctgagatgttggtatcgagatggggttggagatgtcgtgtgatcggtataatgagcataccattagcaaagaggtcgtgatgtcggttagttacattgagacgaacacattgatttgaacctgatatcttacaaaagcgacacgaaaagcgacatgagggatacacatgtgtagacacttcaaaaactatttcacaaagcgcatcaaaaaaaaacaaagtgtcaacacagaagtagaattgacatcgttccctaccttttgctcctggtagttgtaagggagttgaccggtagttggtagccctaactcatgagaccctttatattagaatgtaatatattgaattacttgaaattgaattcgagtggtaaactggcaaatatgtacataatacagcgcgaagtcaaatcatttggtcttgatatgcctgagcttcttgggctcgtgaacgtagttgttggcataggacttgggcacgatacggcgctcgttcggttcctgaacaaagtattcgtatccctgcttctgggcaaaagcgattgcatcttccttcgacttgaacttcaggttggtaccctgcatgccatcggcagacgactgccagcccatgagctggttctcccaacggtaaccccgctgcaagacatcccaatccatgcgccagtgatgctggtgccaggtaccttgctgtgttgcggccttggtagggcggtagatcctgtgggagtcatgggttagtgtgtgggaagtagataggtgatcaagctctaaattcgtataacataccgaacagtgcgggcctgaaggtcagtgggggctccggagagcacggccgcggggagagttttgccgggctcactgccatccatcacacgcttgggcacaggggaaaattgcctgaattgaagccagacttgttagtgaaaggatctgcgacggaaccaaaggggaatgtcgtacgaggtaccgtggtcaatggtggcctcataatccagcttgtgatgggtcatagcctcggcgggggtctccttgttgatcaaggaactgtccttgagaggcgtggtgggagcatccgaggtgttggtcttcacggaaggaacgccaacgggggcattagcggagatgaaacgggcattgacgggcacagcaagtcggctggcccgaaggctagcagcacccccgattctgaatagtgacattatgtctttttgtatgcggggaatggtcgttgccaatgaggtcccttcagatcccttcaagtgtggtttggttgcgaatgacaggcaggtcacgacaccaccgaatcgggtttagccgggcttggcaagccgaacacccgcagggctcggtttgttcctccttcctcctccatcagctttctttggttcacttgcgccgcgaatcaatgtgagtccacgtctctaccaccctgcaaatgcccattgacagccgctctattcattgcgcccaatctctgaccccctttagcctagacaagatgagctacattgcccgccgaggtctctcgaccttgatcccccccaaggtaagagcatccctgttcatggctatttgtagtcaatcgactcttcaaacgatgctaattgttccttaaggtcgcctcccctaacgtgagttacccacacactgccatcttcgacttagtgcatctctgccacacccgtcccgccccgaagccgtttttcgtgaaactcgcgatatgatcaaaatgccgcctttctttcgccttcataactgacaaactctcaatcaaggctatcggtgccgcccaggatgccgcccgcatggagcgtgttgtgaccttctacgctggccttccccgtggccccgccgctgatgttaagcctaccggcctcatccgtcgctaccaggcccgctacttcaacggaaagaacgcctccggtcttcgtacgtattcgtccattgggatcttgtattgatacaagactgattttcatgcagcctttgtccacgctattgccggtatcttgatcatgggttacggcatggaatactacttccacctgcgtatgtgttccagctattaccctgcttatatatcctctatatcgtggggacatccactgacttgatttctggactaggtcaccacaagaaccacccccactgagctttctctttccaccgaataggtggaggattgatgtatatactggatcctctgtcctagtgcaagggaaaaccgtggttttagcgagaactttagaatctcactgtgtttcaatattcagatttaccatcctttgttgttttttagtagatttggaagtatacatattacgtagaagcttgagtgacgggctctttccatagtttttcatcacatacaaacttcaaccggacatcagaaattctcaccatttgcaagcaacgacatcatccataaaacccaccctttataaaccaaacgaaccgtcaacaaaactagggctttcgaagagatcttaaggtgtgtgggcagacagacctcgcaactttcgtacgggccacgctaaaccgaaaacagcgaccctcagcttcaacccgagctgactcttgaatctcgtatcatccaccctatctttgtatcatcaaccgtccttacgcataatccctccctctttgccctaatccctttctgggacgtcttgggctgcggacttcccaagacaaacgcgcctatcgattccgcgatcgtgctctccacaccaagcctaacttaacacgggctttctcatcatccgagagagttggccaatactacatctggttgtgatatcccatatattcagggtgcaaccagtcaaggaaccagtgcaactgtggcgatccttggtatctgacgataggtatgtctccttagaatctggcatgattgatctgcagctgcctattacgaccctgatctatctccccgctgtcagggcacttggcttacttgttcgcaattattgtatggaatagaatcgagtattgttatggcagagcagagcaaccgcgatgtggtagatcagaccctgtcgggcggcgagccttcgccttccgacgttcctgcgagcaccaacgacaatttatctgctggaggggacgcagggaagaccgaacatatcgcaatgactaccgctacatcgaacaactcaaatttgaaagatcagcaaaaccatgataaaacgaaccctcctgattcacagggaggaaaagccgccggtgacaaggatactggaagctcgacgacggtgagctcgcttctggatgcgctacagagaacttgctaatacgggcgcaggatacttctaagcaaggcaccggagttgttgcgactcgagttcttgaacttaatggcctggcgtcggcatcggacggcggagaggatacagcatcacaaggtggttcagaatcggatgctagccgatcagacagcaggaatcccactcacggtggctcagtcaaaaaaccagcaggattcaagccagtttcatttgccaagttttcggtaaacaaggttccgggggctccaacacaacctaaggtgcccgagaaaggtaacttctttgttaaactgtctcatagttggctctaacgtgttcagcgccgacctctacaacaccactcggcaccccacagccaagctcccgaccgcgcttggttgcgaagactacactcggcatgcgcgattcgttcgcgaaggctggagcaggcggaggcaagcctggtggatcagggcctgatccaaatcaagtgtggaataagaatagacgtatgtattggtcatgcgatgcagtgaaaccacttgaaaactaactgatatccgtgtagctgttgtgcccgctcctccgaaacacttgaccgatgaagaattgaaacaacaatacggaattcatatgacttctcgtatccaagaagatggggctgttacctccgaagcaaagtgggcagatattgatgatgatgaagacgattgggcgcctgagacgattgagtggacagacggaactaaggtcaatctcactcaacctcacactgaacccccgccggctcccagtcatcgggagcctaaggagttaccgcctgcggaaccaagcatagtgaaggagcccgtcaaggttgcgccgaagccagctatatcaatgggatcccgtgccatggtactcaaggttggagcgaacgctgaacggcaagcgagaactgcgagtgcttcttccaacggtacgaatgacaaagttccatctagctctacaagcccagcacctccgtccaagtctccttgggccgctctgcctcctgtcgaaagagtgtctccagtcaatggcccggtccagcctcaccaacagcgcatgcccgtgagatacccacagagagatgacggccatcatgcctcaatggcaatgccacccaaggagattgcagcggatgatttcaaccgtgcatggaaagatcagtcagatttgccccagcttttcaatcctcgatcttcccagtatgagccggtgggtgaaaccaggagaggaacttggcgtcatgaccaacacccccgtgctcctgcagttttgcagaggccacacgatcatccgagtggaccggcagagccatctgccgcattccagacgcaccgatctagtcatcaggacggtatgggctggggtggtcgccgtcgcacatcatcaaacgtgagcggaggaagcggaggatttggccgtaggatgtcagctggccgatttgatgcccctccaagatacaatgatgctcgaagaggttcccaagtgaacggtctaggtgattcagcaattgtgggtcacgagcagcaccatggcaaagacgaaattgctccgtctggtccaaatggtatagcacgtccagctgttgatgtaggtatgtctcctgtggaaacacaggctgcgattcctcaagttcctcaagttccgcaagaacctcaggaggaccctgttgctctacaacagcgtatcatgaaggagaaacttctagaggccaggcaacgaagaattgagcaggaggagaaagaggaagcggctaaaaaggagaggattaggcaacgtctcgcggcgatgggtccggcgccagagaaaaagactcccgaatcgcgcaaccccccatctcttcaacctcaacctcaccatcactctcaccctcttcatcctacccccacctcttctcaacttcctattcaacctctccactctatttcttcacctcccaaaccacctgttccagaacctaaccgggaaccaaaacagtatggtatgatgaaagtgcatcatccagactctgtcaagaaactcgttggtgcacatgaccggaactcagagcaaaaacatatcaaccgacgtgtctcttcaccccaccaagaaacccatcgcgactctgcacccgcatctgcctcccacttcaaaaccgaacctcactcacccgtccagaacaagacatctgattcaaagctcgacgagcacggtactcagtggcaaggcaatttaacttctacttcgccgtggtctcatccaaatatcactgtcccatctacatctgcgaaaaatctatggaaaccgtttggcagtgaccgcactccaactctcggtaacggcatctttgatcaacctctgggaactttcacatcacgtgaaaatcctctaggccaacttggcttggatccgtcaaatatggcttcccctcccaagttctctgctcctaaggagccaaccgattctttgccatcacctgaggcacgtcacccctcatttgaacccctcaatccaattggacgccctagtccgatcggaccaccgagcacacggaatacgaatactcgtgccattaccgactggaataacttccacgagaacgctttggaaaaggaatccgagaacgcgaaggagttcctcaagcgactcaacgacagacagaagggagtcccagcaccgccacccgcacctgtggtttttactgagacttggaagaagacccgtgccactgaagacgggagacgagtcatcacccgggtcaccgaaagggttatcaacaatgaagaagagattgccaaggccaacgcggccacaaaccagcaatctaaccctcttacgagtctagatgctcctatggatggcctcaacgtgtctgatatcggtgttcgtccagccggcaatgtttctacccggagctcccgattcttcccctcggcatctgaacagtcgaaacgccaggtcgccgagaaggagcgcagcagtccttcgccccctcctcctgaggaagttagccaccctgtatattacggagacgcgaagcggccccatgttaatctcccggcccctaagcctcccaagcccgtcgtcaagctcccaccgaaggccattggtgtcccagcgcccccgccaacatttgcttctatggcagctgcgccaccacgtcatgcggtgcctccttcttccactgcgctttcgtggcaggacaagatcaatggtctcttcgggaagacaactcctactcagaagaagagtgtcttagctgtgacatcagctaccaaggagcctcttcctgttcacgctactgctgtttctgtctctatacctcagaccaggattggtctccaggctggcgatggcgatttcgccgttcgacaagtcaatgaacaggatgagatgtttgaagaccgcgaacccggctctttgcctgccgttcgtgtgccgaatatggcgccccagaattcttggagcgcaactcgtccatcagagcgaccccgtgggaagaacttcaagccggtgcaagcgcagagcattcaggcattcctggttggacacaatgatcgggataatcatggtaatactcgcgcatcggttttccttccaggtggctctgaacccaaagtcgttctcatccaacgcaaggctggatcgacccgaggccgcaatatcaataccaatgtcagaccccgcaagggagtcaacaacaagtctggggaagtgtctggtggtggcaacaagaagcctccctccaacaccatcccacgacagcaaccccgtcagcggtcgggctggagcccagaaccccccacttctcattaagaagtatcggccttgcaagcatatggtttatctgaaagcgttttcggtatcttctctctggttcatttatcttgcctggcaggcgagaaattggggtcaacctcgccaactcctaatcaacatttgtttccgactcttgttgccattgcccacttcgttactcgtttctgaagttgggcccacatttcagatcctccctctaccccttcacgcattcgcgtttctcatgtacttgtgatttccagtttctcacctattgtgtcccctccccggacccattcggaattgcggcttttcttttggcttttgatgtgtggacgatcaccgtctacagattcgacgccctgtttgcgcgatcattgcccaagtggtgcatgcttgttctgacctagcagtatcacattgccgagtattcagccaaatccgcacggatacttaccaagagaattccattgttacacaattccatgttctttttctgttgtaaacgtaatctcgagctctcaagataggcaaataaggtgagctaggtaacctcttaccttcagctgggtagtttcgctagaataaacccttacaccttgtaattagatagcaagatggtgaggtagatttcgactgggaagttgagggtgaaagtgaatggacaacgctgtcgctttctcgatgagattgtggaagtagtagattgatggttcatattacggtggctttactggactcacatcagaagaagacaaaaaagttctccatctacgacgatttgacatactaagtgatgaaagagtttaataaacaacaggtttagaagtataaacagaggatagttaaagatttaaacatatgataggtatcaaccgaggaaagcccctacaaggctcaaaataaacgccttgtccctggaatacgccgcccagatcaacccaaaggtcaaaacaatcgaatcaagagacatggtggcatttgtgatgcgacaagtctgaagatgaccatcgtttcgacgtccataacgcccccaaaccaagcccgaacatccattagataaccacgcatattaaaacaggtcgcatgatattgaacaaaacgaaagtgagcagagatttctcttcaccagttccaggtccggctggaagcagcaaagacaggaggcttccactggagacgggcagggtcaattttgcgcgcgcccttgatctcctccttcttgagtcgcttttcgtgctcctccacgacctggtccgtgagtacaatgacccaattacccttctgcaaagagagttagtaaatcacacggtattgtatgtactgcagtacagttatacgtggaaatcagacttacgtggtatcggagcatgttgaatacaactagagtctcgtggacgtccttctcagtcatggaagtgagcaccgcgagctcgttctcgcttatagcttctcgggtcggctcgatcaataactccactagtgtctcgcgccagtactgtcgataaccaagtagacccaaatcactgagtggcttctcgggggagccgagcttgccttcacgcttgctgagctcgtagctgaatgagatgagcagacggccgaagccgcggcgttggtattgcggcaaagtcataatacacgccagattatacccctcagcggagtccttctccttagagaagtagccgacgaaatggcagccggtttcgtcgcgagtcgtcatacaatagaacaggaatgggtcgacatcgtagtaaagcgtcttgtggtcgaggaagagcttgctcaggagacacaggttccggcaccaggtgcgctggcgacggccgtcgacttcaaagaaggagatatagtcgtcgcggtaaatctcattaccaggtgggtgggtcaaggtgcattttgcgcgatggcgctcgaaagcacgcttgttgtcaaaatagctcaggcagaactcgtcgatgtagactaggtcgacgtccgagaaggaatccgggtacggcgagaagtaccacggctcgacgtcgtacttgcccatctggaggcgggtcaagtttcgcacgcgatggatctccgtcgggttctgtgtcatactaccacctgtgcggagtcgctcgatttcctcccctcgtgtaatcacctcgcctgtggtcgtttggacatgatcttcttttaccgatttactttcagctgcagcatctgccatttcgaagtcttctgactcggtggccttgggtgtgccggctgtcgaaacagcctcagatgggaacatcgatgagtctccaggtgtttcgacaccgaggttttctttgcctccagccttcgagggccgtgacaacttgccgacgttcgcattattgccgcctaagatatcgggtgtttgtgacatatcacggctttcagcccgagcacgcttatttgcattcacattcttgctaggcgccgctttgctggcagcagcggtcttctttttatcagccttatctggctgaggccattcaacttcttgggagagatcgatgcgagaagacgcaacccattctgacaaacgagtcagagaaaagtccaaatgaatgcatttgtggaagtgggaacttaccatcaagacgtttgttaaaatcgacatagtgtacgctgggttctatatcagcaccaattcgaaaaaaaaaaaaacagacacaatatgaatagaggcaaacatactaaaaggaaggaccatcctttcgctgtctgattgacagaatctcagcttttcgcagttctccgtcctacatagaatagtcagtatcaaagcccatactgattgataatcacgtgatatggacacaaaaatctgcgaccacaaggccagaacgaaccttctgcaccatggctttcacaccgattctacaaagccagttagcacttgcgaccgatgaaagtcgacctaaaaagcccaaggctaattattctggatataaaaagcgacatacctgatggtgttgagtgtggcgaaccctctgtcaacggggtcgggcgtccccgtcgtctccccgtgggaatctcggacgcccatgttgtcggactggaagttaggattgaagcaatatcagagatgggaatgatggaatcgagcagatactgtggtcatttggtgatggggaaatgatgcgggaaagggagcaaactgggtgattgttatgtaagctgttccgcatcggggtcccgagtctatacaggacttcattcagctgaagatttacagagtacaactatattacaagagggggagggaaatcttttcatttcttgaaccatcccaaatgataatgccataaacaccgtctcccgtttgcgggatttacattcccttccatgttgtcatgatcttgtagataaaatgcaaagtccaaacctacgccaagcgccttgcaatgaaccagagatgaagagcagccgagaaagaagccatgtgctcaacctaaagactatatacgtctttcccatcacccctcaaatttccgcttgacaccattcgcatttgcggacggtggcaaagcttgggctctccgttttttgtcctcacccgcagcagccatattgtgctggcgctgcttccaagctgttttgatgaggggagcaaggcggatgagatcctcttcagtgacgcggtcctcaatactttcaagaaccttttcaacagtggagatgtggttcgcatcgttcttgtcatcacgaagacgatggaagcgccagcgtccttccatatctttggcgcactcaacaatagtgtcatcaagaggaatgccaagagctttgagatcttcccattcctttggctcgagaaacatctctccaaaatgacggtactcaccagcattgagcatgacgaacaggtggcaggttgggatagcgtcgtagtccacgtagggctgggtgataccatcagcctcatcctcggtatctggctcgagtgtcggaaactcaaggcgcatacggaaatcaacagtgttctcctggggtggcttccatttgaggatgtgctcgtcggtgccgatgcggtacggagtactgcggcaagtaaagatgagaccgtcgttgccgtgaatgcgcttgaccttgggaatgatttcgcggaacatcatctcaaggccgtaactaaattgtgtggatttgtcctcgactgcgaatgggcggtgattcttctcctccgggaatttgcgatacatggcattgtatggcctgagtaccttctccttgaagtatgctagacgcttatcaagggtacggtgcatcaagctttgcccgtccagcaccaggcagtcgaagaccagatatttcagctgggtggttccatcctcgtaggtgtcgttgacaagctcgccgtcaaccagggtgtcgacgtggtatccctggaaactttcgtcgttcggtagggggaagtgtaggccgggcacgtagcggtagtcgttcttgcgatcgatcaggtaatgaatctcgggcatatcggagtcgggatctccgcgcgcaaaatacatcaggcagcggataccgtcggtcttttcgcagacaaagtagtcctcccgctgtagctcgacaaggtgccgcgacgagaagctgaccggttgtgcgccagggaagttgaggttgttgcgcccgagaaggttggcgacttcgcggcgaaactgatcagctaggtcatggtcggctttgatgccaatcgcgtctagatcggggacagcgtggctcattgtgaaaagttgaaggttcagagggactgggtttatggtgtaagaagctcaaggatgagtctgatagtcctagatttccagagttgagaggggggtcgagctgcaatcaataagactcggaaagcttgatggtggagtagcaaatgcacagggcgctcgcccgcaatcgcgacaatataaaccagacgcttttcagctgcaggtggctttggaaataacgaataaagaggatcgcccaagggtcatagtatggctcgctttgctcatgctgtcaggtctcaaagacaatggatgatcggcgaacggaatgagatggatgtccttatgcctcaggcacacctcacgtaatctgaatagcttcacgccctgggctattagtgcatagcgtattcattggggtgtcctacatggttacagatggcatttatgcttacagatttattagacagagctcaatgaggtagaaagtattcaatcgcaacaactttcgaaacttgaatgtacatatcacgccagtcggggtatcatatcgtcacctttcaaagcagacagaaccagcctgtacccatggcctatccagggaaatcgaggaactaaaaagatgcaaagaaatcaaagaagaatagtacagtcagtagtcctcctgcacccatgaacgccagcatccagtatccagtacacaccgtaaaagctcaaaccttttcaaaccacaaccgcaaacaaaaaaagagtcgtcataaatcatcgcctgatatgcgcaggttgattgacaagccaatcaagaggcagaagtgaccggggttttgcggctacctggaacagcagatcttttgcttccatccattccaccagcagagatatcaggctccccaatggcgtcaaccgatgaggatgattccaaatcggtcgcgacagtcgagaaaagaataccaccgaaaagaggttggctctcctcgttggagaaaagtccaccgccgtttcgaactcccatggcatgcgacatctgctccttgatgcggacatatcgatacttcgacttggtggtgatgacggggtggcgcacaaggggttggggcgcagaacgggcaatggcggccatgacagcgtctctttcttcatctgagtcaataggaccggtgttctcgatatcttcctgcagaggagcgttggcatcgatagccgcctctgtggttcgaatgggttagtcatctcgtgatctataggagcagcataaacaagataatagcaaacttactctgctggcgagcctggttcttcttctgatactgctggagaagcatatcatatggcagtgtccggccaggaaccgaacgcttggcacccattgaatggctcttgcaggtcaaggaacgagcgcactgcgcgccgttgggaagagtgacaccgcactgtttctcgacatcgacagggcccttcggtttggccgtcttttgcttgacctcatccttcttcttctttttctttgactccctgccatcctcttcatcggccttgcgcttcttgcccttcttgttgccgtcctcggtacccttggcagcgctctttttggcgcttttctgacccatgttagggttttctccgtcggccttatcggcaccgtcatcgtctctatcatcgccggccttcaggcgattggccgcgtcgcgggcttccttcttcttgcgcgccttctcctgcttggccttcaagcagccgcggacatgatcagctgcggtttgcttgagagtgggccgtttgcaatgcttgcagatgacggtctcgaggaggtcatcttcacgcggcttgccggtcgggaacacggaaacgactttgctgtcgagggagggaataggagaggcggtaggggaggtatcgatagggccatctttggcttctattagtttgttagtatcattaattcctgtgaaagcatatccagggagctttaccatctgccttcttcttggtagacgccttggacgtcttcttcaccttgatcttgccgggtttagtatccttgtctgtgaaagtgtacccggacgcatcaacaagacttccccgtcctgtcaaaaaatatagaattagctcagatcatttgtagatcgatgcgccgaacttgatctcgaagtatcctagatgctttgcgcttgacaggaactaggtattgcttaccttgaccggggtcaccattgttcgccatggtgagcgcaaagggagagagtaccgagagacagaacgctttcttgtcactcggaaagcctttgaaatggcgtgggggtgtttataaaggaatgagttcagtcgccggagtcaaggtcgggctgggctccgcgttaggatcagtcacgtgccatctgttgatctattgaataggcactttggcttctattttgctctgcgtgtaacatttaattctattgatgagaatagctaatggtagagactgatgttcttccaagcaatttcttgatacagtacattgttggtcaatcagattaaccaggcagcgactctttttatgttgtaggcaaatcagcacctgccaagcttgtaataagagagttataatttgatggcattcaggacgttaagtatcgcatatagaattgaatgatacgctgccctaagaaagagtagaggcttcatctttataggctttaagattaatggtaggccgaccagcatagaataatagtcaagtcaaaggtagcatacttagtcgcccgtgcttctggctccaaaaacacattgttgtactcaaacaaatattcatacaatatcatacatgttagaaacaaatatcatgaataatgtgcaaagcaaaggctactgttagtgccaccaaaaccaaaactatttgtcaaggcaacatcgatctgtcgtgactggggatctttcggcgcatagttgcaatcaaacccatcagccaagcgatctaggttgatagtaggtggcatggtattctgttcctcgttagcaagaacctagcacagcatgtctagtgtacagccactcacctcatggattgcaagtacactgatcaaagcttctatagcaccagcaccaccaagcagatgaccgagggcaccctttgtgctgctgacgttcacatcagcagccttatctttaccatcagggccaagcaggagggccttgatagcagcgttctcagcagcgtcaccgacaatagtcgaagttgcatgtgcattgatatagtcgactgcagcaggacgtaactgggcttgcttaagcgcctttttcatagccataaacgcgccttcaccattttctttaggcgaggtcatatgatgtgcgtcgctggagcagccataccctttgagttctgcatagatccgcgcccctcttgccagggcatgttctagctcctatactttaggcgtcagtatcgggttgtagtatgcgtataggcaggacatacctccagaaccatcacagctgcaccttcgccgactacaaagcctgcacggtcggcgtcgaacggccgtgacgccttctctggagtatcgttaaaccccgtcgatagacttcttgcacgcgcaaagccgccaatggccaaaggatggatacaggactcggcaccaccagcgaccattacatcggcatcaccgaaggcgatgaaccgagctgcatcgccaatggaatgggcaccagttgtgcaagccgttgttgcggaatggctcgggcccatgaacccgtacttcatagagatatgcccagcgccaaggttgatcagcagcttcggcacgaacagcggattgacctttttgtagccctgtgcaataagttagctgtatgttcctagatcttatacgatataaacttacacccttgtcgtaggcaataactgtgttgtagatttcatcaaaattcccaatgcctgatcctagacagattccctatcaaaatggttagtatagctgtcaagcttcacatattcccacacatactgtggcttccctctgctcaaaaagcttgggcttccagtccgcatcttgaagcgcctcttccgtcgccgccatagcatactgtgcaaacttggccatcttccgctcatcctatccattccaaagtatcagcatcacaaataaatcacaaatcacaaagtgaagatagctggcttacaccccgactcaaccattccgaggcagtccatccaccattatcgcgattgccctgtgggacaacggcagcaacctgacagggttgctcggcgaagcgctcatcgcgatccttcacattcacaacgccgcaatggccatctaacaagcgtttccatgtacgccgaatccctgcagccaaacccggtgttagtcacagtaacatgcgcatgtgaaacccagtatgtatacggcgggtaatgtctcttatcttcccggtccgcattcccctcattggctgtcacgaccttccccttccggagtgggaagtggagaacgaagaagctcgacagctcggagtccggggatatcggatagagctcccggacaattagagatggatagagtgtgctggcattgtcttgctgacagataattgccgaattgtgtaattgcatgcattgtacccggtcacatgtccaggtgagctccaaggatgacctcgaagctatcgatgccaaaacaacaaaacaaaaaaaagaagcaactcacctacacctagcggtgtcaccgccccaagaccggttacaacgactcgccgcattgcatcgttaataactttgtataaaagctatcggaggagttgtcaaaagaaagaaaaccgaaaagcgggccacggccaagaagggaaagtcttcacgatcgggacaaccctatctgttcgtctttccctttacaacactactgcttcaggaaacttgacgagatgggggttatgtagaaaaataaatctcttcatttccatcttctcttttacttcatcccattaacttcagccatgtctgcttggaaaaccttcctcacactggctttggccggctccgcggccgcctgcgcgcaccacgataacggcgaggtagtgcccgaacatgagcgggcggaattactcaagaagtgggatcaggaggtatgccaatgctagaatatctaaggaatgaggtccgaacgactgctaacatgtaactatagtggactttctccggcattgccagcttcgcccacctgaagccggtcaggtgtcttatcgagcccgatgagaactacgacattgccattatcggtgcaccatttgatacagccgtcagctaccgacctggtacgactcaccaccaccacatccaacatccaaaccaaacctacgaaacaaaatactaacaaacccccaccaggtgcccgcttcggaccacgcgccatccgcgccgcgagcgcacgccaaatggccggaacaggctacaacacgcgcgccgggatcaacccctacctatcctgggcgaagatcaccgactgcggcgacatccccgtgacaccgttcgacaacggactagccgagcgacagatgtacgaagcgttcctcgagctcggatcccgcagcatcgtgaacaaagcacccaaggcgaacgggatcggcgcccagcaccccaagctcatcactctaggtggcgaccacagcattgcgctacctgcactgcgggctctgcaccagatctaccagaagccgatcacggtcgtgcacttcgacgcgcacctcgacacgtggaatccggtgcggtacagcgcgtactggcagtccgagcagacgcagttcaaccacgggtcatttttccacaaggcgagtcgcgagggactgatttgtaatgctacttctgcgcatgcgggactgcgcacgaggcttactggtgttgatgcgggggattatacgaacccggggcctgagcagggattcattcgtattcatgcggatgatattgatgagcttgggcctatggggattgttgagacgatccttgcgcgcacgggcgttgatcctgagcagcctgtttatctgtctgttgacattgatgtgttggatcctggtacggcgcctggaactggaacgcctgagcccggtggttggactacgcgggagttcattcgaatcctgcggggtttggagaagttgaatattgtcggtgcggatattgtggaggtttcgccggcttatgataataagggagagactactgcccttgcggcggcgcaggttgcttttgagattattactagtcttgttaagtctggtgttgatgaggagcttggtgggtggtatgggtggatggagcaggaggagagaaagaaggagcaggagggtaaggatgagctttgagtctggacatttggacatttagatctacgagatgcatgtggaatgaagtgaagaatgaatgatatctatttgaatgattccttccttgcctgtagactggagtgatgtcatggcacagtaggagcctgaactcatttagcctatgatctcacagactcggacgggagtaaccttggaaatacaatatcaaaatactacaagctacgtgacagatacacgttcaacccaaatgtcttcatagaactggttgtattggagtctgtaactttctaatgacccaaaataacgttgctcttcagtgagacataactcaaaagactgcaagagatcgcagaaaggacgtaaacgaagacgcttgtatcaagaccgcgcgcatggagagtgatggcgattgtagatcagattggagtagaggaaatcacaagcaaaaagacgcagagaagaagccggatctgcaagggaagggtacagcaagctcaaattcatagtccggggtcgcaaagctggggtacataaatagcacgcgaagaagaaaaggacaggggcatatgggggatatgggacaacattgacggaaaccgtccagccaaaacacgacgccctgacgtccaacgccgagagagacgaccgaagaggtgaaagtgccgggtgcggagagggtaataggtgatatgtggggagtgtagtcgacgcgacaaaaaggggagaagaaggtcaaaattgctgtcgctgtagttcgtgaaggagaggaatgagggtagaggatcgggatcggggaaagtaaaaggtaatagacgagcaccgaggtagctctagaccaagtcgttgaatatggcaggtagatgcggccaggcgaaccaagaagaaaagtagaagcagagatagagagcagaaaagggacaaggcaaactagagagattagggctcgaaccgggatatgcgaacagagacaaaataagagagaaggaggtcaagaaaaagcacagaagccattttcaaccggaaaacgtagatatggaacgcttcagatagcatcgctagccataatacaagaccacactcctcccccttttttttgtcgctgaatttggatatcccagaaaaccagtccagtcagaaatatttgccgcccaatagaacgtgaagagtagaaaaagagataaacaggttcattccatcgtagctgcttcgaggcgcgcgtcaaccaggcatcaacccaagtgcaacattatccgtcgcactcggaccaacccgttgcgataaatccgtgaagggtaacttcacagcaagcggcagccccttgacttcttcttgggcgcgggctcgagtgccgcgacaatagcctagaaaggtagaaagatacggtgtcagtggcggtgtggagatgtcgggcagcaaaattgaaagactcggtgtacctcatcaaagacgtccttcagcttgtactgagtcagggcggaacattcgacgtatttaacggcgccgagttccttggccatccggtcaccgtcttccttgcggatgggggtcatcttctggcgagcgagtttgtcccggactccggcgtcatcgcgtaaatcggtttgtgtgccgacgatcagacagggcacaccaggacagtggtggtgcacctcggggaaccacttctcccgaacgttttcaaaggaggcgggcgaggtcaccgagaagcagaccaggaagacgtcggtctgtggataagagagcgggcgcaggcgatcgtaatcctcttgaccggcggtatcaaacagtcccagggtgtaaggctcatcgccgatcctgaatttggagagcgatcggttagaagtgtttctttgaggctagactgacgtataacttttttcttctcgggggggaggggtggggagatgacttacatcacggtcacggcgtagttgtcaaagacggtggggacatattccgaagggaacttgttcgttgtgtatgagatgagcagacaggtctttcccactgcaccgtcccccaccacgacacatctgggttggggttagccatgagatctggggggtttttttcgcctcggcaaagagtgaggagatgaagcgagatggaatagcgtacttgatggtagcgacgaccatgttgaattaatgagaagtgttgatgtaggagtgttagagaagagaagtgtgggagacaaaaagggaggaagaagctgtggtctggattgaatggggcaacccgcagagtatggagtctagacacggtgctagtttcgatacacggtctgtacagcactcgcttgcttgaacagcttcttggtattaattgtgttctataagagataatttagatctagcattgtcgtttctcatattttgcactattctatatgatctaatactcattcactatgatatttgctgttgatgtcattcattacttgccaagagaacggtatcagtatctcgactataaatatcagctcaagcgctaatcccctattctattctttacaattgctgtatcttggagactcgaatttaggatatgtaggggaatgacagcttcaagtcagtaacaggtgcaagtacgaaacacccatcaccccaataataccccaagtaactataacttcagtataactagttaagataagccccgtcgaggaacaaaaggagacccccggggtgtttaccccctttttccttcgagtcgactatttctttcacccttttggagaaaagaagcaacatgggaaataattaaaaaaccccccaatttcattctcgtttcaccattcacggtcccccggcctcccctcggccctaaatccccccctttccaaaccgtcgttttacatcgtgtgatagagatccgaggacctagatggataccataaaatacaatccatagtacattcatacggttgacgatccaatccagctctcattattacctacgttgtactccgttctccgtaggtgccttgtttccatcacagcttggcagcccgatccaggtccagtctctgcacgactagcttcactacgttggcagagcttgccctggcgggtgcctcatattactagctatctaagtatagcgacctatgtcacctatggttctgattgatggcctgacagctgacaactgacgatatattgcaggatgcgtcctccatacggaatacctccgtacaatatacattgattgacagtaagcacatgcacatgctaggggtgccgggcagatccaattgccatctcatgtatccccaagcccctccgtcgcggtatctggtctgcatgcatgcatatatatgcaggtacataggtacatgcacgggtaagatacgtggataagacgtggtgcgtatgagagtcctggtatacgagctggataaaggcggggtgataggctggatggagaagaaaaaaacaaaagattcacgtatttcaacctctacaaatctagcaaggctttccggattggaaataaagtcgatatccaaatccaaatccaaatccttcccgcatgacggatagcagtggatataaggccgcgatgcgtgaagttcgggctggactagactgggatatcttcataggtcagtgcaaagtacctctggtgtgccacaccggggcgaattaactttatttctgctgtttcagggaaatgaaacccactaggccgtaactgcagaggatgttacagcctgaggggcttagggcggcaagccggcgggatcggaataatcgtctggttttggtgatgattttgatcggaagcgccggagcgctttcaaggtttggagtgtgcggatcatgcttgactaggtggcaggacgtgggtgttatctttgtcgaggttacaaatcactacgatgtgtagggcaatgtagcagggcaagtctttcgctaactcgggtattcatattttcggcgttgataactatctcaattcattgagctgtttcagtcgtagaaagatagatacctctaatcccgtgaatacgtaaatagtaacgccgaatgcaaatggtggattggctcgcgtccaatctgagtgaacagaatataacccgaaacgcctggttgtatcgagatgcaaaaattaagccatggaaaagccatggaaaagccatggaaaaggcacaaaaaggttcaattcgtaagatcgtaatcgtctgtgtgttgagtgcacacaggaattccgggtttaggtccgtttggagtgtccctcacccgagttgggctctacttctgcctcaactggaggcggggcgccccgccgctcaggactaccatagcccatctagaatcaagtcagaggagatcatcagataccacggtttggtgacttaccttgtcaagtttgtagtcgaccatgagaagactcagtggaatgagggggagggtagcgatgacagccagcgtcaacagcctgttcatggtctcttggtacgcacggttgatagcaatgcgagttggagatcccattgggtacgacagagcggtggtcagcttgccgaagatttcagcagcttggcccttgctttcctcggggaggtagcggagaagcttgtttgggatagcagaggaccacacggctccggagatagcagcgccgactgcaccgcccatctccatggaagtcaggaacatcgcagtggctgctgcgacttcctggtggctggcggatgcttggacgcccagttggacgggcacgttaaccagaccgccaccgatgccgaccatgatttgtgtgccgaggacttggaagtgcgaggctccttctcctcgacacatgagcatgagggctaggccggtcatgtacacaacacatccgatggtaatgtagatgcggtatcgccgggtatacttgataagaagtgatacgctgaatgcggcaatggttgaagtgaaagagaaggtctgggtgacgcgcccggcagtggcaacgtcatatccttgtacaacctgcaggtaggaatagagataaggttgaacggagaagtagaaggccactaagtagggttagcagggacacctcgaaggtagagagaataatcaattcactaaagtaccagaacgccaatgcacaacccgcaagagcagttctctgcttgagcaggtgtagagagagcaagggcttcggggccagtttccgtgaagactcccagaacggtagcagacacaggcaaacaataccaagcgcgatcatggtcaaaatactggtgttctgccacccgttctttgcggaggccgcaagagttaaaggcaccagaattaatgtgacggcagcggacaaaagggccagtccgccaacgtccagatcataccaggtccgacgcacgacgctgacaaaatctgttcgttttctagtacgcttcttgatcaaattcaatctctgggccttgcgctgattgaagagcagggtgagggcgagtggcaggaaggatgcaggcaagataatagcccacattccataaccccatcgccatgaactactgcgcagcaccgcgcccgcaatagtcggtccgagccagaccgtaaccaagaatgggaattcgggcagtagggcgaggaaggcacggttcaacaggtcactgctgtcggcaatgaatacttgttggaggatctgcaagcccgttgagccggcggaataaaagatttgggcagaggcgtaggtttgaacgttggttgagccggccatttggatgtatcctaggacgtatataaggatgctcaaacagaaagcctcgaagcgaccgaatacgtcggcgatcttagccatcgggggtttgatgacagctatagattaaggattagcagccgcttattgaagcggggtagtagatctcaccattgaccacattttgaataacgaggacggtcgagatcaatgaatgtttactgaatgaactcgtcgcatatgcagacagcgacatcacagtctgaccttccagcgacgtgcagaatgccatgaggaatatactttgcgctaagtcagcaggggttcggcaagaaagcatgggactgcaagccacacgaacctgacgtaggccaccattaaagacttggtcgtccaagtcagattgatggcttcaatcttttggactccctcctgaacttcatccggtgtagacaatccactaggctggccctcgacctggtattcatcctgcaacagttgatcccgttcatcctccatcctggcgcttccgtgttcaatagtgccgtaggacggtcctgagcttgaatcgagaagcggcatgtcgcgcgttaccacaagatcgtatacgttggaagtattctctaatggacagggtccatataagaataaccggcaagagagttcggtctgggattggtagaaaccatatacgaaagacggcgaccttaaaagcgacgattaagcgagaaacagaccatcaaaaaaggagttcatgcgatatcaaacgtaagtagcgggtgtatcacataaaagggatggagccctgctctaataagtagtacttttgctcttcagctagatagcccgagccactcaggtccacagagaagaaaaagaaatgacaatacgggatgtcaacggcgaatcagagactgatttaggacaggacaagaagaaaataaatatggggcgtgatatgtaaaaagatgtcgaagcgcgcttgcctcggggggtcgacccatgaagggctattaatattggaagtaagtagcaaaatccggtaggcagctatggggcaaaagatttggcggatgggtagatccgccgtgcttcggagggcgacgccccaaatgtaaggggaacaggccttgaagagtttaggcttgccagtctgcgcaaaaccacaccaaccccgatcgtcggtcgcacttatgcacgctgatggggtctgtggtgtagtgaggtgagatgagaggctgaggtccgatctcagctcgctctctagcattccaggttgctgcaccaggacagtttaagaaacagtgtcacgttgcaatccagtcatcattctgggatctgaactgcccaggtagttcccatgtattctccgcaaaagagatggaaaatgtgtccaagagagaaaatgcaaaagaggtggagtttcaggcacggggagcggaggggcacccgctgaatacacttgttcactcggtggcatgagctgagtctttggtactgccaagtcacggtttccctggttcacgtcatcagataagatggaaccttgatctcttgatctctgttatttgtttccaaagagtctcttctcatttcgaggacacttcgctacatcataatacaatgtctccactatgtggcagcgacatgcattgctaccctgtcatttattacctccgatctagggaattgttagccggaatgacggggccggtcacttgacctggctatatcattttcccttctatgcacattattaatgcactccgtagttactccgtagtatttgatatactttaacagcggaaatgaaattgggaaaaggaatgcaataattggatggcatctttcatttaggtacttctctccacttgtgtcatatccacacgcgactggtgtgacctcggcatccgaaacagggcctgtgggcgcatacacccgattgtcgggattacactgcactgggtatagtaggatcagatagctcagtgggaaggtgtaggaatatgcgctctaatgggtagtatacacatataggatagaagaagaacagcaagaggacccgaagtctatatatccactataagtattcaggggtgcccaggagcgcaatagacatccgatatagtgccaagaacgctaaaaccatatgcaatctaactatcctcagtgttcaaattagcataacctctctattaatgcatctggtaaccgcaagtgcgtcagcatggctgatcatccaccatgacaaagaacgaaccatgaatcttggaagaaagcaacttgattgactggaactatccgtacatcggctgatcttcgccatgtcagtcatctttagcagatacacgaggtggacctggaactctgtggagccgtggtacatatgtccgcagcaagccggtatccttatttctacctgaatagatcattaatggcctgccgtgttccgttgcaacgtatgatcaaactggtcttactttacaacatacttcattccaatcttcctattcgtcatatatactgttgtctcttcgcagtggccatcgtcaccttattgaggcatataactaacaacgtcctgctgacctattcctggtctatgatcaaatgactgaacttgacagaaagctccccgccctcggttgatggccgggcagcatagataccaacccagaagtcctccacattctcctgttcaaagatccaagtgacctcccggataggagacttctgcaagccctcaacaagatagatccacagactgttgtcctcttccctgaccagttcaagggttgccgaaccactacctgaaggcactggaagcaaactccagtccgcccagttatctttggcgacgacgctgaggtggggtttgccgtgggtgagttcaatgccgcacttcacccacttctggccaccaccagcagtattgaggacgagcactacaccaccctggtcatatttcttctcccaaaggccagtgacggcgacgcggatccgcttgaatgacttcagcggcacggacttatacagaatcggggccgagaaggagatcgtggaaggtggcttggcccaaatatctgtggaagctggtgttttgatggtaaactccgcgggaaggacacctttgcctggcacttcggcatcagaattggcgaatttgaattgcgattgcgacatggtgggctgtggaatgcggggaagccgtggtatattcacagatgaagtatattcaatcaccacgccacggatacttggtcaagtgggtggtttaggtggaagattgggattttagtaagtgaataaagagaataactcagcggaaagataaatgatttcgcctaggcgccaacagaacaggcaagtccatgggtgcccggacgacagctacgtcactacataccgggacttcctactgcggttaaccaaatgatgaaatagacatagagctctcaatttacttgttttgttcaatgttttatttcccgatctagaacgtatttattgaagcccagaaacatttgggctcgttatattcacatcccaccgtacagagtaccgaggccaaggcaatacatgtaccgcctaatgtaatagctataccgcccggtgctttccaattattactggcagacaatctaattgccggcagaataataatcgcaagttgtctgacaccacgtgatggcattgatgatgtaagttctccatggaggcttgctttttatcatcaacaatagctgcaatgtgccagcttattgaatcaatttgcagctaaagataggcctaagggtgtatacccatttggtaccacgatccgccatgactgcacgactactgcatcccgatgaatgggagcttgcctcgcggtcctcagttgactcgcaggggacgttcaatctcgacgaggccgatttcgaagctcaagtcccttcttcatccaaatttggtaaacgaaaactgccctggctgtcccaaatcttctcctcggcatcggcgggttatcgccgcctgaacaacacttccaaaccgattctcgcaggcacaccacgaccgagctgttctcgacgtctctgtattcgccgctgttgctacctgcccgtcgtcgccggcatcgtttttgtcctcgcgctctttacctcgctactcttcccgtcatatacccatctacccgcgcattactctacccttcgcaaatcagtactcgagagctcataccccggacgaggcaatccccgcaaggagaaggtctttattgcagcaagtctgtatgatagtggcggcaagcttgctcagggccaatggggaacacaactcttggtgctgattgatctgctcggtcctgacaatgtgttcttgagtatctacgagaatgacagcggtgacgagggagagcgcgcattgcgcgcgttagaggagaaagtggagtgccagaaatccattgtgtctgaaaagcacctggacctgaatagtataccgactgtgaccattcctggtggatcaaagcgaatcaagcgcatcgaatatctggcccaggttcggaaccgagcattacagccattgaccgaccacccggagatgaagttcgataagctactctatctgaacgatatcctcttccagcccgccgaggttccccagctcttattctccacaaacgccaacgaggacggtgttgcccagtaccgtgcggcctgcgcggtagactttgacaaccctatcaaattctacgacacatacgccacccgcgatcttgaaggttacagcatgggtcttcccttctacccatggttcacttcatccggcaaaggcgagagccgaagcgatgtgctagccggaaaggacgcagtgcgagtgcgcagctgctggggcggaatggtggcatttgatgccaaatatttccaatccggctcgccacccacaacgcctaacccagctcgcttccgctccggacaggatctcttctgggaggcgtctgaatgctgccttatccacgcggacatccaagacccgcaaaccaacatcgacgagatcaccgatacgggaatttacatgaacccgttcgtgcggaccgcctatgactcccgcactctctcttggctaggagtcactcgccgcttcgaggggctgtactcgttcctccacaaccttggcaatcaccttgtcggtctgccttggtacaatccccgtcgtgcggaagtccccggccaaattgtgaaggagactgtgtgggtccctgatgctgcgcaggacggtaacggctctttccaggttattgatcgggttgcgggcaatgatggctattgtggtcgtcgcggcctgcaggttattattcaagaccgtaagcccgggcagaaaggatacgagagtattcctatcccatcgtagacctggacattttaatgttgtggaatcagatacccattctatctattcttgttatatagatttgcttcttttggtttttttggtgtattgctattttctagaaaagctttaggagcattagatcaatgcataatttgtgagctgataattatttttcctccttcgctcagcaaaaaatagagtcgttcaggcaagggaatactaactaagtaagcaagtaagcaagtaagcaagtaagcaagtaagtgagtaagcaagtaagtaagtaaacatataagcaagcaagtaagtaaaccgcggcgtagccactaagctgggtaggttcgaatgcctaaaggcttgtatagagtatagaacctaggctaccccctacggtaggtcacattaggacaggctttggttcgtctactcccagcaaactataacccgtatgcgtcaccaccccgagtggtcgcttacaggtagctggtatctcttgagtctagaccacttaaggcgtgctgcgcatataagagcgaaatgtttccattccccccccccatttcagatctaatggaaatgcacagtatgcctatgaagtaattactatactaacacactacaacaaaatactgaggacttcatcatggccatcatctcagaagcattgatctcagtctggtcacatctgccagccatcctcgtcacccttgttatatttcactttgggcgcaaatatctcaacccaggattaacgtccatccccgggccattactagcgaggataacgaacctctggaggttcatcgatgtcgccaatggccgttcagaagtgacgctccataaccttcaccaaaaacacggggactatgttcgactaggacccaacgtggtcagtgtgcggaatttggatgccctgaaaacaatatatggtattaataaaggatatcaaaaggtgtgttcaaattgcaataactgattgatcattctgctaatatccgcaagacaaacttctattctgttcagcagcagcttgtcaaaggaagaccaacgcctacactatttactacaactgatgaagtctttcatgctgctattaaaagacccgtctcgtcagcttactcaatgagtaccctgactgaattcgagccttttgtcgataagatcattcatactttatttgggagattggatgagttcgtagctgaagcaaaagtctgcgatattgctgcttggctacagtactgtaagtctcactcttctcgcgacatgagagcggaagctgatgcagctcaaaaagatgcatttgatgtcatcggagaattgacatttagtaaaccactcgggtttcttgagaaagggaatgatgtcgacggaatcatcgtcgcattggagcatacgcttgactatgtcggaaaggtaagtattgggtgttggataaatgacacgaaagctaattagagtgggcattagatcgggcagatgccatggcttgactaccttttcatcaagaaccctctcagaagcttcttgacggggggatcgaccggggctgtggctcgctttgctcgcgcaagactagacgaacgattgaagcagaaaagcacaccagtggccaagacacaccaagactttctcgatcattttctgaaagcgaaagacgagcatccgactattgtagatgacaaccaagtcctctcatatacgatcagcaatatgaatgctggctccgacacaacggcgatatctctccgagcaatactttattacaccctcaagaacccgccagtaagtataaagctgcaccaagagctcaccattgccttgaaagaaaaccggatctcggtacctgtctcatggaagcaaagccaagagcaactcccttacctcgatgccgtgattaaagaagcattacgtcttcacccggccgtgggattgatgcttgagcgagttgtgcccgccgaaggactccagcttcctgacggcggcccattcctaccggccgggacgatagttggtgcgaatccgtggatagtacatcgtcatcgggtctttggggaggatgtggagtcgtttgttccggaacggtggctcaaaatggataccgagtccgaggccaatttcctggacagaaagcagaagatgcttcgtgcgacgttcactttcggagctggaccgaggacctgcattggtaagaatatcagtctgctggagatttataagctgattccatcgctgtttctgagatacaaggtaagagtatggttccagaaacgagatttgactctaaccggggcttttgcagattgaattcaatgatcctagtgcagaatgggagattgttaatgcgtggtttgtgaggcagaagaatatggatgtgaggttgtcctgtaactgaggctatagtagtatcatgaagttggacagcggcgaccaggggaaggactcgaaagagcgactcactctctattttatctagatccaaatgttttgttttgcagagaatggctactgagactataatagctgaagctaccttgtcaggattggagagctgtcagtagaagaagactgaagaagaccgttctcggaaggtaccacaacgtgcctttgtcctatagttccggtatagtagctgacgaacaagacattgcctagcacacaatgagacaagttaatacaagcacaaggagtagcagaggaataaagaatgctgtttgcttacaggatatttctttgtctgacatctaaagaacagtgggatatctaatatgtgccctataggaatgactccgggccattctatcttgatgtctgtcttctaacccggtctttcctgaatgaaacaagtatagccagaatattaagaaagcatgaagcctttgaatgttccttcccgtcttgcatccaattgtgccttcctaattcgaacacagaacgcatctgttctacgcgggtactccaaataaaatgttccgttttgttcttcttcttcttcttcttcttttcctctccccatcctgctacttttttcgttccatcatggagacaaccaaagtcattgggcctagcggccttgctccaattactctgcagcgattggcagagattcgcatcaccactgaggtcatctacaagatgatcaccaacagcaacatgatcagtctggaggagagtgcccatgctcctattgatgtccgtaacaaggctcgtgctgatcgcctcgctggcgtgcacacggtctcagcttccctgaccactcgtcgttttacccagatgggcttcaaggagcctaagctgtatgatgcctcgaaggatattgagctggccatgcaggccaaaaaggtatgtctcactcttcccaatgcccccaatgcccccatttcccctcatccattcctatccccgcccactacatgttatggtcttcttcattaagtcgcttccattctctcttcgtgttttgtccccgcgacttgatccccatttcttatcaacactcatctctcatctctcttcgttactcccatctcacactggtctttcataggacgagaaagctgctacttcccctgatgccgctcaggagactgccactcctcgtgcccctgcttcgtgtgcccccgccaaggagacttctggcattgatccgcgtgctaagccatttgttcctgctgccaaccctgctggatccaaggacaaagctggtgaatgcagggatacagacaacgactccaccgctggctccaaagcatcccagaaggccgagtccgtcgcggatgagtctactgactcttccaagaaacccagaggtgttactgccccagctgacttcatgaagcaagtccgtttgctccacctgcagaagcagatggcacccaaggttgtgcctaccggacctcctcgtcggatcgttttcggagatcttcctgactgggccaacgtctccagcatccttcagctcgtctacggcggtgctatcgagcgcgcttggagtgaggatggccacgtcgtcgtgcagtttgttgagcaagacgactgcgttaaataccatgagaaccactctgatggaatcaagttgaaggatggtgatgacgacgtcactatctctgttaccatgcccgaggagggcctgaaggacaataacgagctttcgaagcgtgtcgaagatggtgcttcccgcatcgtttgcctctctggcctttcccccggcttccagactagcgacaacgagaacatcttgggtattgccgctgaccctgcctggggtgccaagagcttcgaacgcatcatgatcaagcaagctgaggtaagtttgcagtagttctatgttttgagtcttactaaattttctttctttcaagtctggcattgacatccaggtttccttctatgatctccatgacggttgggagttcttgcagaccatcaaggagggcgcgtatgactgcatcgccagctttgaaattgatccgtaggtttccggtttgcactttcactctttctttactaactggtctactagatgcgctctcgcccagggtttccacttcatggatgagcccaacctgatgttctctggcattctcgccgttgactagggtatggaatttatccatcagcaaccgcggccgcgttgatagccatcatggcttggatgaaagtggaggggatacaaaggaaatttcggaattgagatcttgcaatttgctttcgatgggttttcagttagtgattcttcctcttgctaggacataattaatgaaacaattaaattcgatcaacccttggaacatataccgtatatagtagctgctacagtaacaaccttaccgtacaacctagatcttacactcgcacaaccgtgacgaaagaagcataatggcacataatatttaagcctgctaattggccgctttaaattaaattagtcataaagtatatcggcatttgcagtgcccctcctgctcttttcatattagtgcggatgagattcgacagcgcggaagagggccagtggtcgaatggagtcgaatgtggagttttcaggatttagtgcgaattgtagcgccggggatgtcgaaccgatgtggatagctttgaggtctaatttttagtttttgaattgcgttacttagtattagtatacgaaggatagtacaatgtacattgtacgctttgccctaaatgccatatgcagtatgacctcgcctagttataggaccgtgacacaatactacacttcatattacctatatcgtacagtctcaacttgcaatagaatgaaatatccataattatacaactagctcgtattattggcccccaaagtacagagtccaaagcacatttaccaaatttcccctggaagcgaacacgggctaactatatcatcgtgcaacatcatgcatacatactatgatatcaagcctcggcaatgcttcttgattctttatcgccacaggcgacctaatttaccttttatgacgcatttacaaagtacatcttcaacacttgacatcacacatcaatgaccccttattacattaggtattctacattacatccgccccacagcccgaaataacaattcatgcccactagaaataaagtcctcgaatcgggaattatccttctgtcaaagagaaagcgacagaaaagaaaagaaacgaaaaaacccacgatggagtccgcgggtgaagtcccgaaccccggcacgctaggaattgacaggatcggccccgtttatatgtctttgtttttccgacgatctctaggggttagcgagagtagtcacgatcaaaacggaaacaatagtaagattaactacggagtaactaaaacaattaactaccatataccgaaaagagaagccgatcgaaaaccacggcaattggcccaagcccgagtccaagcccaagtcccatattatattgcacgcacggctaagtactttgtacatacagcataagtaccaggacaacaatgcgattctttaagcccctgacaagtccctgatcctggtatgggaggctctagaagtagaagtacatagttatacatatgtgcctagtaatgaactaactaatacaaaccggtactttggctttccccattcatccatcccgtataagccgaagcgaaggcgaacaaagaacaaaaagaaagccaccaaaaaaaaaacaaataaaagcccctgatcaagtaatggaaatgtcagaatcgcactagataactaattcccacatccgagatcttcatactagtacggagcacggcggatggcgacggcgacggcgacggcggacggatatggagcacctagacgaaagatggcactcgccttgccgtgaaggacagggacccgcgatcgacggatcggagggattggccgggttgtggataggtttcttttcttagccttagcatggtctggctgtgttgactagcgggttggatggagtatggcggactactacgagtcatgttctgggtcaatatccagaccaagaatagatgaagaggctagaatggtctgaatggtttggaattggataggttgcgagtatactatctactagcatatgtatgcagcgataacggcgagtcagtcattacactagaggttggactatgttggatatcaataggcgaggatggaccatggcgttgctcgggatttggaataggaaggatgaaagtaggggatttgcttgaggtgtttgataataatgcagaggataatacctgattcctggataaagcattgaaagtagaaaacattcagactcaattcaacctcgacttttatagtaatatctagatctaaatcccgatgttttgactctcacggcatggatagctccacacaacatatagatattatagccccaagaaccaagcttggaaagtgtaaagtgaaagtgtagacaagaaaaggacaggaacccagatggaagatatgtaaggagagaacatcaaaacgacaacagacctcccacgctgaacagaggtatcttaataaagacgaagaccgacccacgcaaaaacaagacagacaaattgacctcccaacgaaaccacccgaaaccaaaaaaaaaaaaaagaaaatcacttccgtcgcaacggcaacgcaccatccccctccttcctcatccaaggataccaaacattagtatactgcctaacgccatacttcggcgtagcaccatgcgccgccgaggccccctcacgcaagaactcgccgtcccgcatgcgccgctgctcccgcagcgtcggacacttcttctccttgataaagcggtagaacttgcactggatgccctggaagccgctgcgctggcgatcatggaactggcgattgaaggcagcgcggacctccttccactcctgcgacaggtcgacgcggtggtaccagatgaagtacatttcctcctcctcgtactttggccgcggcggccggcggcggtcgccgttggtcgaggaggcgctggagacgctggagtagcgctcgcgggagtggtaggggtttggcgaggggggctcggagagcgagctttgatttgtgctcgtgctggcgcggttggggtccgcgctggcgctggcgctggcggtcgaggaccggtaggtgaagaacatttggtgggaccgggaggggattacggtcgaggtgctggatagcgcgcctgggctggagttgtggtagctccggctgtagcggtagtctgggctggcgggcaggaagcttggtgagggctggtgagaatggtagctgtggcggtgggctgggattgaggcgtgctgggagcgtggagagatgtctccgtcgcctgggttcagcagggcgtcgattttcattttgctttggcgtgcggcgggcagtgttgcgtatgattctgcgtgtgccattttggaatatggaattgggccagtacgtagattttggacgggatttatagagaccaagctttgaatcctccccagaaatgctcagaccaggtctgatagtagaagtggggatatagaggtctatatcagagagccaatggacgattgggaagtacagaaagtaaggaagtatagtatgcgcttggggtaacgggcaaggtttatagatctctcgaaaaagaaaagaagatcagcccgccgtcttaaaggaaaaaaggacgcgaaaagatcgaaaaatagttctcgcagcgttgggtgcactggaccgactgcctgggtcttggttgtgttcctttggccccccctgtatagctgtgtaccgcggatacacaaggctcctggggctaacaggggtctgttatgaggtttggttccacccccagacattgaataatataataataatataggaatataggaatataggaaaataaaatacaaatacaatataataatatataatataataaatatatatatatatatataatataatataaaacattaatcggtgaaccggactgcgactccgttagtggagagaattattttattaattctatatcttttgaagatgtggcaattcggtctactccgattccttaacctttttcgaatccttctttctttgtagagaagtgatatgggttccaaggttggagcttctttaacgggacgatctttctaatttcttttttctgtattgtatatacagcatacatacatatgtgtatgcacatactccgtatgcgtaaaaaaaaggagggccacgcggtaaattcattttacctttagccttttgcaatcttagcgccaaggcgaggtgatgaatgacaaatcgtatatcaaaaagcagttgagaacatcgacgtaatgagaccgatatccaagtcagagagaatcattgctggtctttgggaccctgctgcatgagcgcttaggtgagaagctcgattgagcacctatcagataatgtagaaataaaaaaagaagtgaagaataggaatctcgtgaatttcaattcaatttctgctttagtgtcagtgtttcattctgtccaacacgactttgtccccgttgtaacttgctcatgtgagtgggtaacgggctacctgatactccgtgtcttttccccttccttattttttttttgaagtcagatgtagacacagtgcagaaatggaaaaggaaaaatgaaccaacacaaacgcgcggcgtctattggtagacgcaaagtctgttgctgcgacgtacgccatggccctgggatatcgggacgaatgagcgtgaggagctaatgcaggctcgatttggcactgccaacacatctgtctttcaaggcgcactatgaggtaagagagatccttgaagaccgtggcacagttctgctctatcctcttcaggctgacaatagtatgttgtacttgccaatacacgactactatatactacatatacttacctacaatctaactatactcttattctctcgggggagccgacaaagcggatttcctgcgcagtcaacttgcatgtatatcaaatccgtgacgatacatgtcttagcactgatcctgatgttactcgcgtgataataattttcctctgcgccattttccctcgatctgcgccttgaccaggccgatcgtcagtcatctgcagccgccaacggtttcctttgattttcttcacggtttaaccgttacgattctatttgaaacggaattaatataaaaatattaatctcaaggaatacagttgagtctattctcattctcatctcacctcatatcaatagaccgtatcatgtatatcactcttctaattagatccacgcaatctcctccaattaccagaaagaaaaaaaaagaaggaatagaaaagacgttctgatcgtatttctgcggcgcagtcaacttgcgcaagcgtgaaatccatcctcaattagggcaacccatcggccacctctgtatggcccgttgcttccgagaaccccccttcgcaagccccaagcctctcactggtaatcctagtccctgaagcccccaattccgtgcagatcggatcaacatggctccccccgggggctaaaaccagccttttgcccctccccactctgttttctttgtctgccgctctccactcgggacacttttggcgttcatcagtcgcgtagccgcaggcagattcggtcacgtgagggctagtgtaatatatgtttccctttcgtctgtacgtgtattgtatttgtatcttcattcgtatcttttccctataattgcttcgcttcgctccgcaatccgtccatgtagcatacactaaccattagatgcagataatacgcttgaccctcccaaagatcaactccttcctgaaccaacacgtcgtggccatccatggttggcgtaattaccgagtttaattatcgtcacatttgcgcgagtcatgccgtgcatattgcatgcccatcctgctccaacggttaacgtaaaaagaaaagaaaaagaaatgaaaatattggacgatattcgctcattaattttgaaattaatttcagaacgtgggcagattggtccaaaattcatgtatatcgatccaatcaccgtccccagtcgcttaacgtctgatttatttccttctttttccgtttcttttccgctttgtctgagccgcgtagatcggtgagatgtgtcgaaccctcccctttttttttgtacgtttttgtactttttctttgtttgcgcaatcctcagctcgaatcggcaggctcgaattccaaatttctcgttccccaggcctcttctgcagctcaaggtagacgtcagcagccaaggacgctatgtcctgttactagacgttagcgatagccgccgcctgccccgctgcagcacgcaattaattgagtcatatcggattttatagttatgttgcgacggaggatacctacggagtactcttaactccgatagatcgttacgggcattgtttgggggccgacctcgatctagaatctcattttaccagagtagatctggactcttcttccttcttcttcctattattcctgcctccgtattcgaaacgggctggtcccgtcgacagggggggtggaaatgactcgtttgaatgcgcaaatttccgaaaactgcatctcggatactacatggtagggatatcaggatccagcatgcccggcgaagatgcgcagtcactgcgcaacaacagtcgggaaacccacagtttcaagcgggcacagccgttgcctaacggagacgaaagaggggaatagattcgcttctcccccacaatgggccagacaaaaggttcgtctgtatccgtaaatccattatccatctgtcagtacctccgaatccgaactccggcaatcccccctgacggatgtcataaccggttggcctggattggctgtatacttccgagaagattccaaatagttcctagaaccttgagccttggagccttggcctttcgaaaccttctcccttccatagatcgagcttgaggctcgtttctagcgaacttgggatcggagtcgatcgtccgaacttacgccgaactgccagattgatataatactgtcttactagacgtgggcatttgcaatcgcagcatggtgcttgatttggcgtagtggagcatgcagttgtgttgtgaactggatatgttgacaacacgtcgataccaacttccaagtaaatcctgcattggcgccagaaacacctgaccgtagcctcctgcaagagaatcctggtcatcccaacgttggcagttgttggctattgggggcccgctaaaggcgcagaagccgggcgccagttgttgcaacatccgatcatgggtccgggtaatcatctcttggctgtgatccttcaaaatcaataatcatttgtcaggaataaatagaattattaatccagacttagcttccccgtaactcctctcgggcttccgcttcggatccgactcccctatttagctatggggcctattcaggcttttggtcgatttcagccgcacggtgccaagctaggatttctggcactagccacgacagagtatgtacggagctctgttgtacggagtacgtgtaatacaggtatccaatatagacgcaagtcgtacccatattgagaggctagactacggagacgttgattacggagacgttgatgtgcactattagtgtatggagttcaacacgtatatctccgctcccaagaccccacgccattcgcactaaactagtaaacgatccataaacgatccattaaacgggggccggccgaatcctgcacggttcgatccagcgcagctcacccgcaacgagagtggacgtgatcatcttccttgttttcggacgctctcgagtctcgacagactccgctgggcatattggaagtcgtgatgctatcatcctcacacttagcaccatttatatttcattcccccgtccattagtactattggcccaggtacgaatatcctcacgaatcaaaaacggggaaaatcacccgccaagcaagcttaatatctagtagcgactagtgcctccagcttcttttcccgtatctggcctagcgcgagggaaacataggtaccgagtacggagtgctgtctgtcacctttgtctgaaggagatccgagatctgacttttcggcaagacatgaagagggtctaggtgaagtcagtttgggccccccccccccccccccagcccccccnnnnnnnnnnnnnnnnnnnnnnnnnnnnnnnnnnnnnnnnnnnnnnnnnnnnnnnnnnnnnnnnnnnnnnnnnnnnnnnnnnnnnnnnnnnnnnnnnnnnnnnnnnnnnnnnnnnnnnnnnnnnnnnnnnnnnnnnnnnnnnnnnnnnnnnnnnnnnnnnnnnnnnnnnntggcccccccccccccccccggccagacacgcgcaaaaagagagaaaaaagggcaacgagacacggattttagtaatttccgttttgacctgagcagctcaaagaattccgaattctacaaatcgtttggacgccggattccgccacacttctggaatcgatcgacgcgcaaattcaaagaaatgataagcgaagcagcgaatggggatccccggccgaaaaggcaagaaggatacggagctagctggttatgggtggctcgctgtatttggtattttcattacgtttgttacgctcgctactgcttactgaggattatgtatccagtgcccagacgctaatacacatcggggcaatgatgttatattaccttggcaatatcaaccagcttgaactgaactctttatattgacattcagctgcgtggatccccaagtcatgatatcaacacttgagctggtaggaccgatatccacaagaaccctctattgaattctatactgtggacaggaatacgacatgatattgcctgatgtcttatccctcgaaatgctacaggattgggtatttacttcccttgtcgatcttcttcagtgccaggcgatgtgggtatacttcggtttcgcgtatggtttccccggtggttatcaagatagagtatataaatatatattgtgcccgaagtagggctatcatccggcgctattgtcatgttactatctaaagccaagcatcgcttattcctggtggagtgttgagaagtacgtataagcactagtcacacgtggttcgtgacgaactggcggaggctgtgcttattctcatgtcagatgatctatttcttttgttctccgtcttggctgttattgttctaatctgattgtataggggtttaggtttccagttggataatttatccgagatccatacacatatgtagtcatggttacacggcataccatataggtacgatatactcgtacgcagcagcatattatttccactacgactcttcaaacgatgtgtccgtgcagtactccgtactcgtacgagcacacacctgatatacatcatacagcccacctaaacacactaaccagcagatcttaattagataggcccacaagaccccggctaaacacacccgtctcggctcgcggtttgatagggcgtggatgcgagcttcccccgggtatatgcggagaacaaagttattgtatggatctggcctatcgtctcctttccggaagatcactcgtatacctgctccgtaacgcgcattgtaatggtcattgtggagacggactggatcctgccgaatatcagaatttcgaaatttcgaaatttccactatgggttccgatcagccctggcggccggatctgacatgggagatctgttacacggcggccgatcgaaggatatgcggtgggatgatgaggcgtcgtcggggatacgatgggaaagcatatgggctaggggaagtgggtttgcaatgcagggttaggaatgtggttggatgtgatgtgggttgggaagaaggggtggccgggatgtgcgtgcgtgtgtgtggaggttgtgtatgagatgtgatatggaggatccttcaaaaggaaatatataatactaaaaaagacagtgaaaaggacaagcccaacagtcacccagttggaattatcgccattcgtgaacagcaatagcatcaatggcatcaccgctccgacttgtgatcattagcgaccggtgatcagtccagcgttgccattgccattcatgttgtatacagcccgaagcagtcaacagtcactctgtaaatatcggtgaaaacaccgctcaataccgcacgtgcgtattacttcctgccccagccacaccaatcagccctcgggcattgacgacaatggaagcactaatgccatcagcacaccgaagccagagacccgggtcattagctccgggatcgggccttctggcgtgagctatttctgcactccgtttcggcgatagattgactttgcgccgttggatgttggaattagatctcgggacattaatgttgtcgcctcgggggtttgttgcctggatagtgctggatagtgagcgatgagtggttcagataggagtgggggcatgatttggtgtgtagcatctcttgagttgaggtcgtatttgcgtgatttcttttagcgacatcagacactgtctgcatcagggactatacctagttgagtaggtgattagtcgatagtgtttcttcatggatttctccgaaatctggatcagcaataaccccctcaagcttgaagtataatcaccaaagtacccgagtcccgagtatagcgtatccattctgctccatcctcgaatattattagcaaagtataatcgggcactatcgtatagtagacttggcatcttcagatgttcagtaagtcttcaccaccaagacagatgtgacgaattgtttccgacgttcccccgctgcaagagattcgagcccaatcaatagcggatactcgagactgcccgagcacaggaacctgacgaaatcgcacatcttgactcagtttggcaacagcctttgttcgatggttaatgctcctattggaccataacagaccggcttggataaagcggattctcgtcggtgactttggcctcatccattctccagtcggggcgttgcacggttgtttcgtgtttgagacgtgcagacggagtacagcgaggacatatcccaactccaaggggctgaaggattgggaatgatccgagctttgtattttactattttggtaattgcgttactgtaagattcattcgtaaattaccgctagccctttctttttcttcgtttctttcctttagagcctcacctcctcgcatcgactcccgcttattatatccgcccaacgagaattcagccattaaattactgcaaatgaaggccaaccatggaactagaccgagctatcctctagttgcatatccacacatcggggtagccgaactgaatgatatcaaggtgggttacggccacgtaggagttattcttcagtcgatcttttgggaaaatccaaacgtgaagattacagacatacggagtacatcgtgcacgggatctgcccggtttcatgctaaattctatcttgatcttcgcgactttgcatgtgttaggccgtgtgtccgggtagaaatggggctatttctgcaggatgtagtggggttggtagccttgtcttgcctattttgatcagtcgagatatctatccagccctgcgcctctaaaggctattatatatcagcgccgttggattgtgccattgcaatatatcagctggatcctatttgtcgagctgttgtacatgttggatagcgctgataccgacacctagagcgctaccctagtgaccgctataggatagatctcctgcatgcacaattcactatgtcgcatgcaggccgactgattcgtaccgtgtatgatctcggctttcggagtggactaaacaccggtgacggagtccatgagggagtaactaactatacggggaatgttgtatacggagtccggagtccaaataagggatcaccaaatcgtcatagaccaacgcgatgaaccactgtaaaatagattctccgtccaatagactaaatcgctgccaactatcaagtaccaagacagagatcgacacaccgacaggtatatttgaacacatgaccaacagcactagttagcgcagacagcaatagacatctctcatcgaatcaaccaacaccacaccaacaccaacaacacaacatacaccactgctatgttgtatatacccgccgtgctcaaatgacttcatcatatctaccccgcaatacatccccggctccctaaatctcatcacatccaaaagcaccgaaaacccacgtggcacgataactgactccttcctatctcgacataagacaagcgaaagccgcatcctcaacgacccccgacccttctggttggttccggggtagatcggagaatatgagcccacacacccttcatccttgactgcgtttttaaaaattttaacttccattgcctgatcggtttttttttcacggagatcctccgactacactttcttgtcttgtctggtctggtcttactagtcggttggcgccatttgagatatttttgtcccgttgtttttttcgcgggttggttggagaggggacgatcgggctcgggtgaaacgaaacgaaacgagacgagacaagacagaacggggccatcggcaggagggtatggaattggaattggaaaatggatatggacatcggtggggaaaagatggcttggattcaggttggatgtgggttttcggagctacggggttgccaacggcttggttggtatgtatgcgtccctacacggcctgggacgagatggatggaaaattggaaattggcaattgggatggtgcagtaaggagtgcacggagtagattgtagttttcgtctcgggtttcgatttccatgttggatcgttggtggggggaggggcttgcttttgatcctgattgtttacaacatacgccccaggaatgagggatatatctctttatcccatgagacgggagtgtatcgatatggatgattcatgcaccaggaggattctcgtgtagactccaggtaactctacgattgtctaatctaggtatcgtataccgagagtatcgatgcagccctcgttggcgtattcatacttcatataccttcctcttttagtccagtgtgcgtagcatgtggatatacctgggagtctcaatattagtcctggccgtctttttctcctgccgcgggatgcccaaggtatcttttatgtaattgatcaggtcttggctcttagcagctagctacgacaagtgaaaaagtagcacgaggcttgttgattcgatagaaatatgaagtaggtattcggagtaaaataaagcaaacgctcgatcaggacgtggaacaaaacaagatagagggacaacggcagtgtcgcatagcgggcagatcagtagtcttcatctgaatctacgtgctcgcggtaacgagacatgtacccagacccgccatcctcgctcgctgaatcgtcaaagtcgaaatcatcctcatcggacgacgcttcttcatcggggtaatcgttggctgggttgttttcggctgtagatggtcagtggaggtctatgaggggacgaaaacgaaagcggacaaagagaaggcaaagaagggagaaacatcacacaccattagagtccgcatcctcgctatcccactcctcctcgtcattctcaataaaatcctcccagatctcctcgtcctcggccgtgatgacaatgacacccactccaggctgagacttggcgagatccttttgctgctggtcggactcgaattcagcgagcggattcttcagcatctcctcttctgatagcggacggcgcacgtaaacgtcgtagacatagtcgtcctcgtcatcctcctccacagcctgttcagtctgcggcggtggtgtaaccgcgactctgggttccttgggctgccggggctggtgtttcaacggaggcttaggagccgtgctaaaagcaggctgtacatatgcaggcggaggggccggtttcacatcgatatccatgccataatcctgctcagcctcccgctcaagctccaacgcaatctgctcgaaatcatgagccagacgttcagactcttgctcccagctcctgtgctgtgtctgagcggatttctccaacgtctcagacagacgctgcttcgcagccgagacagcaccctgacgctcctcgcgccaccgtttctcagcctggttaacaacaggccgtttgcgcggtttaaccggcgacgggggcgtattatcctggacaagttccttaggctttagcgcgagagcctgcgcctccgccaccatatccgaaaccatagacgccttgcgcgagtgcgcattgcgctgcagctgctcaaccagaacagccacacccggcgcaggaccaccagtgcgccgcttctggattcccccaggcgaacttctcagcgagtcgagattcgagcgcgagatctggaaccggcgcagggcctgcgcgcgggtcgaggatgtctcttctgatgccgggctgctgtcacgcactgcgggttcattagtggtagtagctgcagagctgccgggctggatgtcggtgaaaggagaaggacccccgtagacggcacgcttgtgcttttcctccgcttctttgcggacggctgcgatgcgctgcgcttcgcggaattcggctcccggggacgtggcccgcactgtgggcacgcccgtcgaggatgcgggcgcgcgccggtttacatggagactgcttactgagcgcggggcgcgcaagagccgttgcgcggctggtgttgctgggcttgcgggttcatctgcactcccatctgcactcttcgcgctggctttcagagtgactctgtggaagacgaagtcggtgaagcgccgcttggtttggtggagtgcggattgaatgactgggtaggttagtgttggtggtcaatgtggcgggcgaggtttgatctagggaccgtttccgtgatattatgtatcttttggatgggtctacatcgcggggaaaaaacacgggaattgttcgtacatagggtttcgacgggctcttcctcgcgccgacgcttgatgttgatttgctcgggtggaagcgccatgatgtcaagttggcatgtattttgcgatgtggattgtggggagagaaggttgaagcattcagtttgatgtgtctgatctttaccgcatttggtctgaatgatcacatgatctgaatatagatgtcacgagtccggacaccagaactaagagggcggagtactgaattgttatatcagaatcaatcaagatcagcccctaatctggccaagatgatattagagccgttacaattaagatacaactactccatacaatgtctttaattagccgcaaactatagaactgcggtgacgatctacgactcttccaattgactggtgcattctgttctcatgtataattgcttcgcttcgctccgcaataatgtgcctgatctattatagatagatgatcatttacatttctaactaatgttccaagttgggtagatggccatttttctgctaataggaccaaagtcccaagtggtcactatgcaatgcgatataatcgccgccacgactcgtccctctccatggtcatcatccagtgaaacatgcgacgtactcacagccccaagcaaaataaagagatagaaaaagttcaaagatagaaagaaggaagagactcagggccaactagcaatacaaggtggtaagacaagatggtatgcaaaaggattaataggggaatatagaaatcgcgaacggaatatgtccggacgaagagtggaaatccaaaaagccaaagaaaagtaagaaagtaaagaaaagacaaggggtgaaagtgaaagtgaatagcgaagagtcagaaaggtaaaaagattatgaccaatacaagaaagaatcagatcaaatggggggaggaaagacatgacaatcagaagggactatatgtaagaagagagaataaagtggcattagggtcaccgaggacaagagtcgaaggttgcatcctcgagtgcgcatataattatttggctccgatctcctcttcagcccagccgggcagcgagttttcgttttgaatagccagaccaaatcctgagtggttcagtccaccgagggcagagaagctggagaagctgctctgaggctggtgggcacctgtgcgggggtggggttgaccagagacaggtccgaagggctcctgggagaatgagggcaggctgacagcccgtgagtgcgaagcacggggcacgctcagactgctggtgcttgcgtggtggccgtgtcccgatccatttgccacactcaggtagctgttggaggacttgtgctggtgcatagactggtccatgtgtccattcatgtcgccgttgctgacgctgttatacattgactgctgtgattgtgcctgcgcctgtagaccagagagggccatatggtcgtggagatggttctcctgctcctgggcctgatgagcagacatctggttcaggtacatcgtcaacgggttgcttgagccgatattcaggaccccagaaggagaggtcacgttctgcagcgggtggcgatgctgtccgttatgcgacccagttgatcccgatgccggggaaagggcagggcgagtcggacttgactgggagccagactggctgaggttctgctggaatccgttgagaacggacggtggtgactggccttccatgcctccgttgcggttctgtccattttggttgtttccggcttgacgcggtgggtttccgcagcggtcctttccaaagttgatcttgaaccgccggtagtcctcccgattacgcattccctcaatagccttgatggcattggcgatattcgtgaagttgacaaaggcacaactcttctcgcgcagcgtgttcaccaactcgatctcaccatactccgagaagtcctggcgaaggcgttcctccgaccaggcctcgtccaagttaccaacatagacattgcgtgacgcaccgccgctgactgctaacgcaatggcgggcgggagagggccggagtgtttgccccatccaatcttcaggcgccggttgtggatcattagtccctgcaggttgctcagggcgtaaaaggaggcggccgaagtgggatcgatgaatgtaacgaagcaaatgtgcttatctgggatataccgaacatggtgtagcaagcctccgcgaacgacattgcagatctcttcgatcgttgtttcggggtgaatgtttccgaggtaaatggtgcggttgccgagattgttaacaccgcctgctgtcgtcgccacggcggccgcggcaacagactgttgtgcaagggcattagaaatcagatcacgatccgccgtgttcagcacatgtgcatacccgggtgcgatgccgaggaactgggcagcattttgctgctgagtcttggatacatacgcacaacggtccttgccgtagaacacccgctttggcgcttgccattgcggctcctgggggagctgggtgacagacttcatggcattactgatcgataggaaatggacgaatccaatcgccttctccttgacgatcttgacggtgtcaatgggcccaaatttgcccagatcctcccgcagatcctcctcggatgtttcctcgggcaaatttccaagataaacattacgcgacgcgcccgactgttgaacagccagggcaactgaggtgggaacctgcgacggcttaccccagccgaccttgatatcatttcccttgatggccaacttcttcaagatggcatcggaatggaaatgagtggctgagctgctatccaaaaaggagatgaaagcgcagtttttatcagggagcaggcgcaccgactcaatctgaccgctacgcacgtggtttaaaatctcctcggcagatgtttcagccgggatgtttccaagatacacggtgcgactggtccccgacagcatgcccggggccacggacgcttgggggctgccgagacccccattgcccatcccaagaccattaatcggcgattgcggccccatcatctgggagatacccataccgtcaggtgacatcatgccatacaaaccatggttctgcattccttgcgtagggctgtggatatggttctggttgttttgggagtgtccattgccattggcttgtgagaagccaccgaaattggtaaactgcggcgaagcaaaagccgagggcgttcctggttggaagggactgcctaccagcagctgggaagggagcaggggggtgtagttcatatcgaagccggaagccatatcggagtgttggccggcggcagtgtttatagcggggatattggcgcgacgcgtattccggtccgagaatccttggatatgattggggtggttgttgttgtacgctccgtgagaaaagccagtgtcaccgttcagcgcgtatttagacccaggatgaattagacgcgaattgttcgggatgctcgatacatccgaggcttgcatggcgagagaaatccaacacttgtcctaagacaagaacctagtcttaatcagggggatgagaggccctgactaccagactgagctctgatggggggggggagaaagggaaaaaaaataaagggaggattatcagatcaccattcaggagatgggtccccacagctaagatcacagggaaaaatagggaggattcgggtggagaagaagggaataatatcaaaaaaaaaagaagaagatctttttttcaaatggagacgtgtctaaatagaagttcacaagtcaattggaatgtttttattcactcagggttgaaattggggattggggaatggggaagacaaacctgtcctttctttgtatgtagagaatgccagttatatgtatatcccccacgcagaagagaaagagaaggagaatgcaaatgcaaaactacaaagtcattagcttaaagaggttaagaaaagggaaaatggcctgaagaaaaaaaaaagggggtcagactgggggaatcggggaagagtttacagttgacaggcgactagttccttttagaaaaaaatataaaataatccttaaagccgaaaagaagcgagcagcgagaaacggaaataaaagggttaaaagagcgtcgagaaaaggaatgaaaggtaaggacgtgaatccaggcaaggtatgggagaaaacattaaaagggggagaataggagtgggttaaggggggcggactaacttcaggaagttctgatttatatgcagttaccctcaattggattgtattgatatcgaatagtacaatataaaaagaatcgaatcgaatataaactaataaaaacaaacttggtttccccaaccttgttcccgtggctctgcagaactggatcaggtcccaatacccctgacaggatcaatatagaatataactaaattatatacatctgcaatactcagggacatcttttaaatcctcttcttaatttctgctggacaatagcatgagtcctgtgacaccgtgacaccctttatatctatccacgactgcaatatcccgtgcgaagaacatatcggggccttgatgcctcatttagaccgcttttagatatatttgcaccccatggatatgaagctttggcgctatacaaattgattatctctattagtctaggtgggttattctaaatcctacgattggttcatttaaatctactcaattgttttcgtacatgacagagagtgcaaatcacctagaaaaatagaatgtatgaatctgtatggtgccaaaagcctcattttgcctcatgctgacagattactaagctgtcatttttctgccgggccgaattcaggcatcaaggcctctatccctagcttatagatgccgaagaaactccgggccaatctatactattcacatatttagcccagcaaaggtgcattttcctattctgaagcgaaacagccatctagaccttttatgttgagtttgatcggcactcaataaaccctcgtagagttggccttacaattagtctctgaatatcaaccaattacgttggagagtacatagctttttcttagaacccctaactatcgttgcaactcttgtagccttgtattctccagtggtgtagtctcttttcctgtcaattcttggacctgttaaggagacgttcctcacgttgagctaatatcaggcaaagagttcccatattctgtgcgttgctgatatcttgatgatctgaaattgaagtagatagttacttaaagcaatgtcgtcattatacttcatgactcacggcattatcctcaataatcagattgaacatctaacatctaatacctatacttcataccaatagttagttgtacacccgaaagacagagatatagatcgccgcctcaggcatcagtggggatcccgcatctatcggaaatttacccctccgcaatgtgcgattcctcccttggacaacttgcaattgggaagagataagagttccattctttgcgttatcaggtgcgtttgctttcacattctaatccgtcctgcatctcgggattctttcagcccggggtatgactcacagattagacctatattaattatctctcccacagaactctcccgcaactgcaaagaccagacccaacgccatggcgtcaaccagcatctacatcgatgaagacgtcggtaaagacgagtcctcagccaccggcaccgagaccgccccctacaagaccctcgtccacgcctacgtggaacacccccccaccaccgaaggcatccagtacctcacgcgcaagtccctgaccgacgccgccggtgaggatgtcgaccccgcagccaaattggagtggaagcccgctaccaagtcggccatgaagaaggccaacaacctctgggagcagcgcaagaagaaggccgccaaggaacacgaattggccatccgcgagaaggccgaggccgacaagcgccagaaggtccttgaggacgccaagaaggtcgtgatcaaggaggacacctcgctgcccaagcccgtgcgcattcgtctggacgtcaccgacccggccatcgtcaagctgcgcaccgccgagtccgatgagcccggcacccgagtccgcgttctgggccgagttcaccgtgcccgcgcccagaaggatgtcgttttcatcactctcaccgacggctatggatacctgcagtgcgtcctgaccggtgacctggtcaagacctacgacatcatgaccctcaccctcgaaacctccatgtccatccacggtgagatgcgcgccgtgccccccaagcagcatgcgcccaacgaccgcgagctgcacgccgacttcttcgagatcatcggcaaggccgctggcgacaaggaggccattaccacgcgtgtggcgccggacgctgacccgcagactctctacgacaaccgccacttggtgctgcgcggtgagacctcttcctccgtgatgaaggtgcgcgccgctaccctgcgtgccttccgcaaggctttcgaggagaaccgcatgctggaagtgacccctcccgccatggtgcagacccaggtcgagggcggcagcactttgttcggattcgactactacggcgagaacgcctacctgacccaatcctcgcagctgtacctggagacctgtctcccctccctgggagatgtatactgtgtgtgcccgtctttccgtgccgagaagtcgttgacccgccgccacctgtcggagtacacgcacatcgaagccgagttggacttcatcaccttcactgatctgcttgaccacctcgaggatgtgatctgccgcgtgattgattacacccttgctgagcccgagatcgccgggtatatcaagcagctcaacccggacttcaaggtcccgtcccgtccgttccgccgcatgaagtacgacgatgctatccagtggctgatcgagcacgaaatccccaacgaggagggccagccccacaagttcggtgacgatattgctgaggctgcggagcgtcgcatgaccgatatcatcaaccagcccatcttcctgacccacttccccgccgatatcaaggctttctacatgaagaaggatcccgaggaccgccgtgtcaccgagagtgtcgacgtgctcatgcccggtgtcggcgagattgtcggaggcagtatgagaatggacaactgggatgagctgatggccgcctacaagcacgagggcatggacccctccccttactactggtacactgaccagcgcaagtaagtgatgtgtcacatttttcctatttatctcaatgctaacattacaataggtatggtacctcccctcacggtggctacggactcggtctcgagcgtttcttggcctggctgtgcgctcgttataccgtccgtgactgctcactgtatccccggtacaccggccgttgcactccttagatatgtcaaaaaagttataaagcatgatcatgataggtacaggaatgtggcatgggtgctacaatggacgaataagattttccttcaaatgaattaaaacgattcagtgtcttatgttaagtacccaggtacaaagtacctatgtagattttgcttgtcccttgaagaacacggatacgaacctaggcctgccatatcccgcaagactcttcaaactgatgcccactgacactccacaccacagcttcgaacaacaccaagtcccggaccttggatactctctgaacacatgtacagtcaagtccacccagcagtcttcgacattaggatcccgcagaatatagtccacacccagggatccaaatccattcccaaaatgttgccgttgccgttaccatccagcccaagaccctggcacctggaattcaaaacccgaccaagacgggaggggagcatgcatgcgcacatagcctcaaaccgagtcccgtctgcatagaagtttagctagattccaaacacggctgttcacgtgcggcgtctctccatcgcccctggccggtagatttgatttcatgttggtgttggttttagtgttggtattggttggatttagctcccagccacaacaactaaagccatagatggaaccgatcgtccggtctgatgatgtgcgagtcagggttgcgatcagtagggaacgggtatgttacggcattgccgtgatcgaggatggggatatggatgttgtcattttcgtatagaaaaagattggaatcgagatcgcgttggatgaagtctggtcacgggcacgggggatcgattcggtgtggtgtcgtcctgctgttgtcgtttcgggtggcgggaaacctctgtctgtcaccttctttcatcatctcccacaacgggcatgggttagttacgggctttttttttcagaaaaatgggcagagatctgagattcgtgtgaaggagtaagagggagtgagagagaaagtgagatggtctcagtctctctccgtctacaggaaccagagacggacagtgcgatgatgaatctgaagtcgatctctgaccagcctcttttcaaaaaaaaaaaaaagaccagcaaactctgagctacatctctagcataggaaagagaagaggagctgtcccgcctacaggaaaagaagcgcccagcaacaaagggcgtgatccactacatcctgtgcttccattgctcgaaaccgcacggagatagaatccgtaatgcccacggggcattcccattccacttgacccccttcgagaaacggcccaagcagcccagtggatattccatttaggtatgtccttgtgagcagaggaatagaactgtgtttgtcggtatttcggaccgaatagacgccaacatcgacggtcaccccgttttcactcttttcaacacaactcatcaccacccaagagacggacgctgcttaacctcgagttccccggacagggacatatcctcgtcgcgtttaagtcttgatgtttgccttgtccccgttgtacctttgtttcattccgggtgatgtttccccgtgtacggagtggcggtgggcctgtattgggtttccgcacaccttgggttagtggctggctgtcagtctcataccgggcttggtattgatagcctgatcgtcggaggtatatagatgttgtccgtgtcgacgagatcacagctgttgtgatcagcagggaactgggtacaagtacgtacttttcttttcccttttcttgctcttggagtcagagaacacgtcgtcgttcctcgtttttccttttcccttccaataaccctaattcatgcataccccggacaatacttgtgacaaaacacaacacagacattcagctctgtatgaaaagccaccccatagaggaacatggatgtgaaaaaaaaaaaaaaaaaaaaaaaaaaaagcgtcatgagttatattgactaccactcgacttacagcatttcatttgtcttatgtcttttccaagacctaggcaaaaagaggaagaagaaggacactctcatgaatcatgattgttctcctagaagacatcaacagtaatgcacgattatgtcacccaattctcgagccgctccaagaaaccaaaaaaagacaaacaatcgccaaagccacaaaccacagcacatgttcgttctcattggtcgagtaaagtgcggcggtcaaatctcatcttggacgcgttgaagggcgaggcggatgtcctccttcgacgccccggagcgaataagcgagacaagccgagcgacagcatcgctatgagcgtcgcgcacgacagcgaccaagtcttccaggaactttcgatagtagttcagctcgatttcctgctgggagatctgctggcagcgccgaggtgagtcgatggcatgttcgctgttcaggctggtggggaggtcacgagatctcagcttttggatcaatttaagcgttgccggaagggggtttggttaacggggcggaagaagaaggaggagatgcgttcagagaagacagtgagagagagagagaggtaagagataatagaggaatggtttctttcttgcaatttgggccggacgagaaacgatgactactcactttgctgcgttctcgctgcgtgccgactcggtctggcgggctccgttgcgagctcctgggcctccttggtcgttggtagagacggctgcggtgcggtttgacatgttgatgttggactgggggccgggtatgtactgtcagggggtgatgttcctatgtgcgaagagaggtttgggaatggtctctaccgtgctcgaagctgatcaaataagggttcctggtgtccctgtgtctacctatagaatagcacaacttcttagtagttagcaaccagactactggcattttgggggagcgaaaacagatcctaatgggagaatggggcaaatggtctaagaggcgaagtatgaacatcaaggtaagaggggctgggggcacaaatcggtcggccatacgtgtttatagacaagtatcaccgcgtgggaagaagataaccttttacatagaatttgtagaaaggttgggagatgagattcgacgagtctcgagaggtcaaagggagaaaggtgggacctctaacagaaggtatttgaggggattgggcagatcgctggtggcatccaacgaatcgagaaatatagggcctggtatacttccgtgaggctctcgaggtagcctcgtgttaacattcgggatcgaatttgacaatatagcaatttcagaataatagaagaatcaaaagaattgcattgtagcagttcgattgtcaagaccttcaatcggccccggataaaactgccagccaatcgtcaagcgtgtttttctccagagagcacatcccaagtatcaatatttgggccagcctaagtccatcttccgctattattttccaccaggctcttcggcttcgaccttggttcctggtgtgtggtttgccgggaaaatgaggcgaatttagggccctagattaatattcgcctgtgtattcggatttgccgaaatctccctcgggacggatagattcttgattccaaagaggcgaatgtattcatttttgtatccgtggcgactttcgcgcttttgtccatggcagtttgtttatggagagtggtggagtgacaggcatctgtactcctgttccactgtttcagtagtgacaggagccaattgggacggctaggactcccgggtggactcgaactaacggcaagtaaactgacagcaagtgtccttggtaaagttgatgatcgccatctcatgctcgttcaaactcgtgggcctttcattctacctcgaggatagagctgtgaatactgatggacaatctgagaaacgtgtttcgtcaagttggaccagaatgatgttctgacatccctgggacccggcttctgtgtcctttcacagacacacattgaagaggtacagttctctctgtcttgtctggatgggattcaccggcagattcgtagaactgcatgctgacttgccctttctttcgtttaggaccgacccttttagcacccaatccgtttctcaacgtcaagacaagcttcgaactccctgttccgtctcctccttgtccgttgacaatcgaaccctccatatgaacatgccgtgtgttcgaccgcacctgataaagttgagcacggtcttttctcgccagacatattccacgattctgaaaatttctctcgataccacgaccccgaacgcttgaaacttggcaacatgccttaaatggcatgtgagcctgtataggcatcggttgctggctgtttacggcagaacaatggtttaatgacctgctgtacggttgtgggggttatggacgtggttgaatgggaggaccgttcaccaacactccacgatattattcagtgtggaaacatctgggtattggatcgagtaccacaactcgggggtgtgacacggaaccagcatttgatgaagagtctggtgttgggtatgatagaccaaccagcccctggctcccatgtgcttctgtgggagtgtgtagcattataccaacattttctgttattgaccacacgaacagtcatcgatgccgcagaatagcgtgtcttgaaaccgaccatctcaactgtttccgccatcacctccagggtattcgcgggatatttccggtccatatggttgatagaggctttcatgcaacggcaacggggatatgaacgaaagtaagtgattggtagtgcagtacggagcagtggcaccgtcactgctccgttctgggggttgtcgtgggtcgtttttgcacatcaaggatgcagtgtatgtggttccatgtcgattcgggtcaaggaacatgatatgatgccttttgatcttgcaagctatgacaattccgtgtctgaaggccactttcgggtcgggtgtcaacttgaacccaggctctcagcatagacactcatggtcgcggagtacagagcgcagtgatcatctgagccaggcatggtaaaggggtatcgatcggtgattcgaggccgtttcatccaggccatgtcgaaggttgctttggtgctgtcgggctttcgacgggtcgtgatgggcatcgacgttggctttgtgtgtgacgaaaacggggggtcgtgtttcccaggcacactgagactaggcaacgctcatccgctgcagtcctggagcatccgatctgtccgagtcagtcactacacagcacggtcggtaacgttggaagctggcccatttggccagctcgatgcatggtcgaggcagtctcttcctgtgatcgtgtccccgttaatatgaggctttctgtcggtgacggtatggtgatgtatatggcagagtagacatgatatgtgagtgagaagcaggtgtgacacttcggagccgagttgggctcgatccttcgacctaaccctgaaagtagacccctgtcaccagtgatgccggaacatcttctagggacaaccccgtctcgagggtagaacctgagactccctacttgtcttttctcctggcaggacacacgcagtatcaaaaggagagtccgaggtctgcagtttcctttcccaaggggaggaaagaccaactctatccttcacttgtccaattggatccacccatgatgaggaaaatagttccaggcgaggttattggggggctccaccggcgccaacattgaaacaagcgtcagacttgcgttttataatgtacagtgatctagtgaagtcgaggaactcggaattcggaccctgctccaccaatatgcgaatatgttagcatttgttgaaagttctcgtggatgttaagcctcaagagaatgtcctatgatctgtgatcgggcaaatcttggttggcccacatctcactattgaccaccaatgcagtggctggaacctcaacagtagaataacgagcaatgttcttgatattgcccttggtataggaaccgttgctgtgaagttccaaagggtcgcagtcaatccttgataggatgcatgtggcaaatgttcttagttcagccacccgtgacaagtagaaacctgctaagtagagttggtaacttgtttctttgcaggtacagggattcttattcataaggtcatccacggctcgaccaaggggaggttcattttccagggccgattagcagatatccatttacaaaaaatcgaggaaaccattctaactcgcatcttaaggtacatcgatgttgaacgagtcagtggctcataatagcaggatacttggaagccttacgtaaatcctgacgtgaatatgacacaggcagatgacctggagattcgacattgattttaccttccaagctttgttatgccatggacgtctataaccttgatcaaggcacaccgaaacgatatcctctttatcaatctacttctacgaattcggtataataagccaagctcatacctctcgggtcagacgggtaccagtcgactatagctatataaacccaatgaattcgaaaatcccatctcgtgtcatacggagttatgtacatgccaatgtatacaaataccacattccacagcccccgaaaatgcccctaacacgacacctaaccacaaccctccattcctaatgtacgcgttaaatactaataaccagcctgatccctcgttgatgataagcctccgacaaaacatctcgacaacgacaaccgacaactaacgacaacagccgacgaccaaccgacgaccagcatctatacaaatcaaaacagacaagaagaaaacaaacagcaaagaaaaccaattcaatccaaacatgcatcttcccatcctcctcctcctcagcgcctctctcgcttcagcgcaattcggcaaccaattcatcccaagcccagcgggattgaaataccccaaacccatcaacagacacccacactacgtccagaacacaaacaaagaaatcgacaactacgacaactacgactacgacgactacgactatgataacatcccaagcctccccaccccaaccccaaccccatccccatccccaacccctcgaatccacagcacattcctagtgcgcccttcgcaaacacccactgtccaagcaacagcccacggatatgggcatgtctacaaccacccaagccagggtccagacgccgagtcccgagacaatgcaccctccttccgcggtgccgacgacaacgacgactacaacgtctcgcccggcacatcgggcggcgtggctccaattgacccgctagcacctggttcccaggtcgcgcctgctccgctcttcgtcaccgcgaatcatgggaaggatgaggggaatgcgttctgttctgggcggtgctttgaggatgaggaggatgcgcagtgtgcgaagccttatgtgagttttttcttttttttttaactcttttctttctgggtatacgatggagatggatatatattgtgtgtgtatttgggtattggtttactaatgtttgttctaggctttggctatctataagccggctaaggggtgctatatgtgctgtattacttccgatttctaggattggattggatattggattcattttgtgagatggggttgtttggtgtttttataggagacggatgggatgggtgttggctgtttcgattgttgagtgttcttggtctatatctgtatcttccgccttgcttaaaatagtttatttcttttttatgtcttgttttagattgaagtaagagtagccgagacaaaagtatcagtatcgtcggtggagagacttgccctaatttcggcagacccatcagcctgaaacaaatctgtacattacacatctatacgatacaacagatcagcactagatcgttggtaggtccacaaataaataagcttgattaaagaaccagactaacattgcttaacttacgaatttacgaatcggtagagatgaatgaagatatgccaaacggtccatttggtctagataccagagatatccgcattaataaatctatattcgtgtagggagtatggaataaataaagagcaaatccatgatatcatatcgttttccacgctgaagagtcacagctcgctcggactcggaatttgaataaaaggataaagaggataggcatggggaaaataaaccgaaagagaacaaaagaaaaaggagcaatgagctccatttcatgaccgcaaacagtgtatgtatttttgttcaattcttcacgcaagtctcgacgggccggccgccaataccccgcgccatgcagataggagcagagcgtttctcatacgagatatctccccacacagcactgctggcagggaggatagagccactgtccgagaggattggaccgacgtcctcgtgcgcagagacgatgtgcgggacaaccagctcgacgcccttggtcacgctcgtaccggaaaagtacgggttgtggcgcgggggcagcgggcgggcctcgtacatgctgcccatgtagtcagaggcagtgctgctgtaggacgacgccacggtagacggggtgtttgtcaggctgggcacgtgactgtggctgtgggccagagcgggaaggctggagctgctgcgttggacggagggccgaagcatgggctcgttgccgccgtggaactgggagagatagttccaggcctcggaggatgccagggacgaggcgctccgctctaatacgggcttccattcggtggggtcaagatctgacttggcatcatgcacgtggctgtgtatccgcatggctgggattcggttgcttggcaccctggtaggggtcattggggccacgatagtgcgtggagagagggaaggagatgtaggtggtgtagtggtggaagacattgatgacatggatgggactgatgctgagagtggtttgcaagagtctttgcggcggcaactatgaaataaataagtattcgagtgccaagatatgatgcaggtcccaaacaaacaaaggggaaggcataggatggctctaaatataggccgagggttaccacatacctttcgctacaatataacaaactgttgttgggggtagtaatttggttttcacacatggcgctggaattgggtcagcttttatgtgcacgaaagaccggtgtaaggaacacagatgacggcaacaggcatgtgaggaaataatcccggcaggattcaaagataagagcttaggggtcacataccaaaagttcaagaagctagccatatcgaattcagtgtcgtccgcagacgtggacttgctcgctcccttttgtcctgagcccaatttggaaaatgtgacggtggcacctgaggtccctcgtcgatgtaaagcaggacgagtagacttggacttggaaacatgaggagaggaaggggagcggcggtggaagggggctgattgagtcatagcggtgtaggctcaaatgcctcactatcttatcgaaaagactctattgccgagactggagcaagtgtggagcacaagggcccctggggggagcacagactgagggatttgtgtgcgaagtcttgaatccaactggaatgtgccgagacgggtgcaattgggaatacaaatggggatttgggaaaatggagaaacaccggagtatgtatattgagaaacgtggggttgacgagaatcccaggctgataaggtcgtgttagccatctgacacacttgcgatgcaaccgccgactatctttagccagtgagtgggggggggagataaggccgagataagaaacataccaaataccaaggatgtctataacggaggtctattgttgtatagttgcaataccagagagaaaggggaatgggtgacacaggaatcgaaaagaggaaacgaaagaatataaataccaagtggaggaacatctgaagagaaaacagacgaagcggaaaaacgtgctgttctggtaggatgagacgatcacgtctagactcttgggacgagaaacccttggggtgatgtatcgggtaagtcacttccgacagcctccgccggtatctgcgcgctaaacagtacttgcatggtacttctcgggtactccccgggtccttgcccgtgcttgcccccctcccgacacgcaatcaatctagaccagctgagtcactggtgacgagccctgccctgacgccagctataattagttagctggccctgatcttattcttaatggaagggtcttgctctgtttctctggatctaagtgtcgtcgttctgaaccacctattcgcttcgttaggtacggacagattgtcagttcgacctcgcgatgtcgacttccaagtatatgcaatgcagtggcgcagggaccatatctccggagggggtcggatctggcgtgatcggtagattgacaccattcttcacaatcggtatattagtattgtatctactccgtacaagttgatacttgcatactggcatgcattgtataccatggcgtataccgtggaagagccacattctaaatgacgccataaatgcctcgacgagttcaaggttcatataaacagacccagatggcgtgaacaggtgggtgtgaaatacatcatcattcacatagtcaactacaatatacagcttgttataggtttcttacaaaatacttcagataatactccgtacagaataacggccggctacggcgacaacgaaaagagatcgacggatcgaaatcgaaaatcactatgggggtagtatgtatgaaagtgccacacacactaacacatctgcctatgacatgcgtcgctagccctcgtcagagaggggggtagtggtgggactaccattctaggccacactcacctgagcaagtcgtagtgctaatcgtcgatcttccgtcttgcgtgtttcgggtctatggggaaaaccggggctttctttcgagaaaaatgccccgatgactgccccatttagctttttgtttgtgatcgtttttcctcttttcccgtttgctttccgccgggtaccgatttcgttccttggataggcgatatcgggatataaatatcacagggcaagctgggattgatttttatcggtggggccggtgacatctgtcaacaatgaatacatcataactgcaaagcctgcttgagtcttagacaaagccgatttatgcgacgtggagaagaggtgatgctgacgtccactttgggttcggcgctggattctatctgggtatctaactaaatatcgtacaaataatcgctcatgctttgtcaatctccatcggctccgttggaggggctgctcgggatgccgctggcgtgggtgtcgaaggagcctcggtgagtgcattccctggtgtctcggcctggccctcatcggtcagtttcactgtacctggtcccggcttgcctgtaaaccgctcgggtactccacgggctgcctcggccggcccgacaaagcatcccagcatcgaactccaaatatacccctccgatagcatacggcggatttggctatatgcatatgaattggcgtaagggagagcggtctctggatcgcggtaacgcgaaggcaatgaagtgatgacgcatagagatgacgagatttctattatgtagggttagccttattcctaaaatttcaaaatgatacatacttgtcaaacggccgagctttttggcgttgaagtacatgctgtatttgcgattgttggcggtcgcatagtcaaagttctccaagatcgtaagacagcgtcccgtctgctcaatcactggagggggttctggaatctctggtgctggttccttcaccaatccatttgataattgtgattcggacggtaatgtggatggttggtttaggctccggactatggcgttttcgggcaccgtggcttgactggtggctgcaggagccggcaaggcttgaggggccagtgagacttcagagctaacagccgtggccgattcaactggccgagacccatccaatggcggtggttctggcacagtcgtcccagctgcatgtgctataggctctgcagaagtcggttgggcagcaacgtgcggagtggccaagcttgtttggtccgttgattctagaactttttgatttttcgtagaatctgcagccgctgcagccactggagaatcaatatccatagcatcctcggttttggtgggtacatcaggcgatttttgaatagagccattatccgcagaaatcgatgtatgatgagacgctggaatttccacagcaaacctcaatctcccataattcttggactccgaggattgcccttcagctgtgatggattgatcttgctcaggaggtactgatgtatttgcgtcaacacttggagctttttccatagcattgtccttgccctgctcggtggaagtttccatgattgtcttcgtctctgggattccatctggttggccagcattcgtcccggacactaagggggtgtttgtgttctctgcagtgtctgtattctctgcggtcggggcagcattctcgggtggcttgtttccagtcggttggtccacggtggacgtcgaaggaggtagagattctggtggcccaacaactacatggaagtatggtggttgtgatgtgcctgtggttgaccccagtgccttcaactctgccgcagccttctctttatcttccttctctttctttttcttcctcagttcatctttatctaccttcggtctgatgtcgattttgcccacccgggtgagacgcccgttcgtccatgtagccacaccactccagtaggaaatcaccggaccgtcaagacgacgattttgtagtgcttcaatcctcgctcgtctttcgtccgcttttcgtttttccgaaagctcccagcggttgagacttttgctattgagccgctctactcttgctgcctccgcaagatggtcttcctgggtcatctgcttcggtttcaaatgggccttccgcttctctgcctccttcattgtagcgatgatgcggactcgtttttcctggctgtccttcagacgagcatgcgtaagctccttgttgaccatggtctgtcgacgtgatgattgccgagtaggcccatcctccacagtgggaatccacgagatgcgctccgactttttcttcggacgaggggcggcggacatggtggacggagcggtcggatcaatcttgactcgtttgcgcaaggtctggaatcggagatcattctgggctctgcgcttcttgcgttcgtctttttgtagtttctgttcgccctcgtagtcgttctgcgcgttcggcccttggtcttcatcctcgtccgacgattcaagcaactcgtcctctgcatcagggtcggccacatccgcaaactcattatcgtcttcgacttcctcaaatagaagcgacaagtcatcatcggcagcggcttcaaggagggccgacatgtgcagtcctgcggtgcttcgtttcgcgcgtcctctgaccaatgactccacgggcatctcctctccctccgaagactggaccgcagacgatgggtcttcttccattatgtcggccatggtgttactggtggcaggtgccttagaacggacgattaagcatcagacgcgagaggggacgcgcgcgcgacagactatgctttgcgtgtcaatgatcagcataaattagaaaaaaatcaaagcatatagaatttggattctgccacacaattaaatgagctgttggagtgatgggaagataccgctgcgggctggcaaggagagtggcgcgaaagaaaagtcgatgcctcaggcgtgtagaaatcatccgaccaatggtctttactaacgtgtttacatgactttgaagcaacgacacaagatttctctgattgttatttggtcctacctccattgcacagtgactgatactactcaacttttatctagaagtgatgatctaccttttatgtactacgatgagccaccctgttcaaccgtaccgaatgcttctgaaagcttggcaaacaccttgaagatccggagagcattcttcaaggctcgacagatagccaaagcctagtctatttacgtctccaacacagccaccacgacccatgaccaaccccagagggccccagctgacgcctctggcaaggaagaaggacggggacacgtacctgatccatatcccttgcaaccaaaacacagcctttggtttcaaaccccagtcagttctccttacatgactagttgcatctcatcccccagggatatcttcgtattcgccatgaagtctcatatgtatcctgtcacggattcaagcgtcgagacatgacgcaccggaaggcggggcctttttcgtttccactcctgtctgccttttcttgcttatgccatgagcccttttcttccgaaagaaaaccttgaattggacatttggagggcatggggttgtaagggccttgtatctgtactaaacgtatacctttttagatttgttgatatctcaccatgttcagccagaatggagtcttctaaattaatgtcatgggccgtgccattgccagacgcttggaggaattgccgattccttatatttttgttcccgtttggttatttcgacgttgaatgtacagacgtgcaggaagtaagtactttatagatgcctgtctagtactaatgcaccttggatgtaccaatactagatagaaaatcaaaccgcctagagtgtcatagactaaatcaatccaattccattccattcaatcagatttcgtattttcaaccaaattcatccgaatcaacaatcgaattgtgggtgaagctgaaggagggccctccaccaaccacagccatcttcctcgggcatccggccagctccccaacatctcttctccttcctttcctctccccttctcatcctccctttgacttcttcctcacttctctttttttcttcttttgctttctgcattcttagggtgaattcgactttcggttagtgttgatgacactttcggagcgcaacactaactcactttccagccacctcgatccctttggacccggatcatcctttccatctttatttctcacttgacgcactttgtgccagaccatctttgtgaacttcgccgtgtttttgagcctttgacgacagaaaaggacttttctcttttttcttagctcgactcgattgctttgggacacccgcagattgtcatacaacccgaacaaacggtgagattatcatcaaagaccctcgacactgcaccgtggtgcttggatttggaaagcatcagtctcggtacgcaaacatcccaacgattcatctcggctttttggaattgcttttcgacccctcccactttgcgaccccccaatagcaacacacatttcgaacaccatctaatttcgactgtttccagtgtgccctcgatccttcaatctatccttatcccatgactcctatcccacactattgaacgaagctacatttaagttccgaccttgctatattttggcattcgcgcggaggtcatatttggaagggattcgggccctgccttgctgaaggtataaagtgataatccataatttgccggtttcgcggcctgacggtcagatgaatttcaattacatcccaaccacccaacccatgtcgggtacctcgacggggcgcagctctcctagcgatgtggccgggtctgggaactcaagaatgtccttcgggccttcttcggggtccattggaagtttgaggcccggggctggctccccttctcatgatttggcatcacgtctgtactcgaagcggtaggtttgcttctttacttcctgtgggatataacagacaccgcgacaattggctgatactttgactgttcaagcagagcccgtgaaattcaagctcaagaaggcctttctcctagtatttggggaccccctaccagcggccattcaaccccgcttcgcgagaatattcccgaatcgccgagtcaagatagttttccagatttgattcctaccagcaatggcgccatggacagccctggtcgccgagctcgcgctggaacggttccatctcgttttcctccgatgggcacactgaatgagatggattttcagcagtcttatatgccacagacttcacgaccaacaccctcaactagtccgtttagacctcccggtgtttccgggatagatacgagttctatcgcgagttcgactggtgtggccaatccggcatcgctatctcgccttcgagctggctcgatgccgcaaaaaagcaacttcttgggaggtggcggtcccttcggtccatcactgttttcaaccaactggtcgacgggtcgggagagagctacaactttaactagtattcgatcttcggaagggccgacttcgcctagccactcatctttctcgagggatggactcgcggacaccgatgtgaagactttggattatctgggactcgctgagaccccgcaacacggaatggcctcctatggacgtccgtctatggaagctttgatgcaacagcagcagcagcaagcttctgcgctgccgccactcttggctgagttggcgatgatgaagagcaataatcgattccgatcatactctgtcaatgccaaggagaagtacgccgatgacgaggatcttgaatacgagaaccgctactcccaacttccctcgggtactatgacgccgaccgccgccgcgaccgccgcgcaacttgccgccacacaggcccagatccaccagcataatctcgcggtccaagcttttgccagccatgcctctgtcagccgaccccgggcgcgaactgctggcattttggaggcacctccccagcgatcatccatccgcaattaccttgctacaccttcccgcctcgacagcagtttcagtgctgctgatctgcagattcccgagaatggtgaatacgacgaattatccgaggcagttcagctgatgcatctcagcggtaacggtattcccgctatgggtggccgaccggccggcgagatggcagatgagaacaaccaggatgggcctacgcgggcactttggattggtagcattcccgtgtccaccactgtcacgtctctggaggccatctttggtatgtatggaaagatcgagtctacccgtgttctcactcacaagaactgcgggtttgtcaacttcgatcgccttgacagcgccgtgcaagccaaatcgctgctcaatggaaaggaaattttcccaggcgcaggccccgtcagaattggttacgccaaggtccctggtgcatcggccaccggtactcctggtgcaaacggcacccagtcatctcccactcctgacccgaacttcagatcaaatgttgcagcgacagatgggccggatcgcgcggatactaatgttatccctcagattcccgctctggctgatctgttgcctgagatggtgcaaattgtgcaagaattcggcgccagtgatgatgacctgaagaacatcacggcaagcatccagacttccatcgcgttcaaggctttcaaggatgaaatcccctcggtccaggaaacgagtcagtcccggatgttcgacgcccctcgtctccgtgacatccggaagcgcattgacaatggtgcatgctcgatccaagaaattgaggagactgccgaggccatgcttcctgaggttgcagagttagcgtccgattatttgggcaacaccgtggttcagaaactgtttgagttctgctctgaatctaccaaggagcagatgctgtctcacattgcaccacatctctccgaaattggtgttcacaagaatggaacctgggctgcgcagaagatcatcgatgtcgcgaagactcctggacagatgcagttaattgttgatgctctccgcccttatactgttcctcttttcttggatcagtatggaaactatgtcttgcaatgctgcctgcgatttgccagtcccttcaatagctttattttcgagtccatgctcagccgaatgtgggaaatcgcccagggacgtttcggcgcccgagcgatgcgggcttgtctcgaaagccaccatgccaccaaggatcagcagcggatgcttgcatctgctatcgctctccacagtgtgcagttggctactaatgccaatggagctcttttgctcacttggttccttgacacgtgcacattccctcgccgccgaacagtattggccccgagacttgtgcctcaccttgttcacctctgcacccacaaggttgcctacctgacggttctcaaggtgatcaaccagcgcaacgagccggatgctcgagacattgttctgaaggcactcttcttcagtcccggcgatgaagttttggagaagattctgagcgaccagacatctggtgcgactctgatcttcaaggtcttgaccaccccattctttgacgagtctatgcggactgaagtcgtgaaaaacgtttccaaggtcctcacaaagctcaaggcttccccaagccaaggctataagcgtctgatggatgaagtgggcctgtcctcacgaggtagcggtcgggagcatcaccatggacgtgagcactccaccccggagaaatcgcaacaccgtcaatcctctcgtcatggaagcacaggttatccagcccagccatccattgaccgacaacagtacaatgggcagtttactcccaacacgtttggccagaacccggacaaccgccctatctccgccgatcaatccaaccccccgccccttgatccatattccaacgggctcggaaaccacatgaacggtcttgccagtataggtggatacagccaggaacccctgagccagcaacagctgcaataccaagccttcctcgccgcacaggctcgcggtgttcccacgggctatcctgccatgccgggcgccaactacggctacccagctggttcgaccatcgataacctgcgatctctacagtcgcaacaggcttctcccctccccggaccgggccagatgagtccgatgctccagaacaactaccaacagttcagccctgttgtcaatcctgcccagatgtatcaataccctccgcaatactacccccaggcacagcctgtgcagggacagtcgggcggaggccgacgtggacgggtgagttcattctcggatcggccctaaaccgtataatccgccgatactaacgtgcatgcttgcgtccagcgttgatcccatcttcgtatgatttctaatcgatctaccttaccatctacatgtataaattttcttgatcatcttttcttctttttttctcatttttgaagtttctcatggagaccaagcgggtttatccagctacgtgttgtgatttcaccgtcctatctcttcaccctgatcggacgctggatcgccggcaggggagaacggacccgggagacgaactggatacgcatggggaatcggtggtgaaaaagtcttgtgtctcttctgggtggaggcccagttttgtatcttcggcgtttttgaatgaccttgtatcttttgatcttacgataggacttctcttctgcctgttgtcttagatcgagatttggctgcctagtggagcatagtgaattgatgcagatgtaaaaaacactatctcgtagtgaatgtaaataaatcggattgaatgagtcaactttgtcaacatcctttgaattcatgaggctgagctccacaactacccggtgcactgcaatccacagcttattttcaccatcgccaaccaaccatggcaagagaatgaccagtatgagcaatactatacaagaggagactgcaattctcttccaggataaaaatatatacctcatcgatatcccgcattcaatcgcgctcgcacaagaggggaggccaacatcacaacaaccaacctcagaatcattaagaacagaaaagagcacgcataagaatatactgaatctactttcatgctcacctatcaaagagccattcccctctaccgagcccaaaaagccagctgcgctcgctaatctcctcaacaccattcccatctctgagagacggttccactcggaactgatactgccactcgtgagggattccctcgaaactatcaaggctgggtgttcccatgatcgccggtggtgtgaggcacgagctgtgcctagtgaatctccaaattatgatagcagaatgccgaatcagaagcggcggtggggaaatgattatatatgcttagagtctgcggatgacggtgtttcgactcaaaatgagccaccaataattctgtcgactacctcaccgaacgacttcgaggctttatcagatcttgctattgtcaagaatccatcaccagagcccgcaatcatcagggttggaagctgccatcgcgacgaagcggattcccctccgtgcgaatatatggcaccacctaaatcgagctttgtgctttgtacactacctctattccaaactgagatctaccgcccatctacatccaataactatcccatccccgggctcccgcaccaccaaaagttcaatctcatcctcatggacccgccgtggccaaacaaatccgtgcgacgcagcggacactaccaaacacatcactattccgagatggatgtgcttaccaaaggattacgagatattctccgtgtgcactcgcacgaccccagcacaaagcaggggctacgccaagaaacccataccgaaccgatccaaagcgaacagtctatagctgctatatggatcacgaatgcggaaaaggcccggcgagcagcatacgaggccctgaccggcgcgggcttttgcatctgcgaggaatggatctgggtcaagactacgtgggacggacagccgatctcagcactggacgggctctggcgaaaaccgtatgagattcttgtcattggccgcaagggtgaccatagtatcaatgtcaatgtcaacgctaacgccaacaatgctacatctctgtctcaaatggatgacctgacgcggatgagtgcgaccattaccacgagacgagtcatcgctgcggttccggacttgcattctcgtaaaccgaacctgaagtcgatttttgagaatgtgtttttcacggatgctggtcggtgccaggagtattctgccctcgaggtgtttgcgcgcaacttgacggctggttggtgggctgctggtaatgaggtcctccggtttaatgctcgtgagtgctgggtcgagcttggcagatagagaatacagtcatgcatgaatgtgcatatgcaaatcaggttttcaggtcagccaggttcatttcgtagatttacgacttccagacttccaatgctgtcaacaagtgggtacaattgactcaacgcttattggagggtcattaaacttggctcaggttgtatatgtgtgatgcatacatgtacatagaggcggtctgatcctagggctaccatcgtggacatgcttattctcacgggaactgatttcctcccgatcagcgcggcaggagttccgcgctgacaaagtacaatataaaaaaaacccctgtagaattacacaccaagggactcaattacaataataaaatagtaccaggacttctctcacactacatatcttcccagaaacgcgggaaacacactctctcgcttagactgacctgtgtgacccccaaacctgccgaccaaattcagcttcatcgaattgacagaatttaccagacacaaatcttctgtctatgatttcttagaaatggctaaggatcacgaaaatggttcaggggtcaagaagagctcggatcgtccaaaatgcttcaccagcacatttcaagaggttctcttcgtcctaactgccacaatggccattggccagcagtccttcttccagggctgtatcgtgggcgtgacagcatctattggcaaggatttgcacatgaattccgctgaaatcacttggatcaacgccggtgcctcgtacgttttccccacatttttctacgggatttccccgggtttctgaatccgatctctttccgaccccatatacggagtccatacatcacaaaacaaaacatgcaaacacataactaaccatgcactcaaataccacagcctcaccagcggcgccttcctactcaccttcgggaagctagccgacatgttcggacgcaagatgctcttcaccatcggcatgggcggtttcaccatctcgctactcatcgcgggattcgctacaaatgccatctacatggatgtcttctcggggattttaggtctattcgcagctgctgtcgttccacccgcggtcggtgccttaggcgctacttacgagaagccctcgaagcggaagaaccttgcctttgcctgcttcagcgcgggcaacccgctcgggtttgttggcggcatgatcatctccggtgttgcggcgcatttggctaactggcgcgcttcgttctgggcactcgcggttgtttatgctatctttaccgttctgactgtatggacggtgccggctgatgggtttgcgaggacgcctttgagtgtcaaggctttgaagcagtttgatattctcgggatggcgttggttgttgttgggtttgcgttcttttcgagttcgctttcgtatgtttttcccccgtggattggataccttcttgaacttcccgctgactgttatagtctggctgcagatgcacccgatggctggaaaactggatacgtccttgctctgtttattgtgggctttttccttctcctggcgttcctgtattggcagtccgttgctccacaccctctgatgcctctttgggtctggcgagatcgtaatttctctcttgtatgtgttcgactttctcatgtgcagatcgaaactaactgttcagctcattggaacttgctgtcttggcttcatgggcttctctgccaccagcttctacctcgctctatatcttcaaaacgtgaaacatctttctgccctagagatcaccgtccagctactcccaatggttgtcagcggcgtgctggtcaatgttgtctgcggtctgcttctgcatcgcgtaagcaacaaagtacttaccggcatcggagcgctggcgtatacagcttcgttccttatcctgagtttcatgaaacaagatgctacctactgggcgtttatcttcccagggctagtgcttgtcgttgttggtgctgacattcagttcaacgtcacaaatgtacgttcagccccgcatgtcctttctacttcttgattccttgtctttcagcagtatgttccgtctttgaggtattgacttcattcagatgtatgtgatgtccacccttccaccatccgagcaatccatcgccggcggcatcttcaacaccgtcaacaagttgtgtagcaacctgggtcttggcattgctacctccgtgcagagctcagtcgcccttcgcatgactgcctcctcgcctgctattcggccttatctctcggtttattggtttgcggctgcggcttcgggggtgtctttggttttggttccgttcttgacaattggtaaacagggcaatgatgtttcgcaaaatgaccagttgatcctcgaggaggccggtgagaagacagatgtcactgctaagactatttctgtgatttcttctgctgttgatatcgcggagcatgagaagaggtaggtaactagtttactgggaaaattagcccagaaaagggtcggcattgtgattgagagcaaatgcgtgggatacctgaatacaccagatatatctgggattgtagcatatctcagtatatcccaacttttctttcagcaattccagacatatcattaaatgtacctaataacatactgtcttcaaggcacagcccgagaaagacatagtatctatccgaataccagatccagaaacacgaaagcaaactcttcaccgacccatgctctaatcaaacaaaggtcccaaactaaccaaactaaacctcaaatccggattcccaccctgcgcctccattttcaaaaacctcctgacccctaactccaacgcagcctcactaagcgcatcctccccctccttcaagacccccctagctaacggccccttcctcctcccgtctaattcccaaagcgtcccgtctagccccctaacaaaggcaacgaaatgcagatctacattatcctccgccaacggcgcagcggtatcccccagtttcgccgcatccgcatgagcactctccaacgccttactctcatacagcagatctgcgcgctccaccggccccaacgcttccgcctcccggagcagggtatccaagtccgagccagcaacgacatgtttcctcgcctcgccatttgcgaccacgtgcagcaggccgatcagcccgcatgcgttgcggatcgtctgcttgaaccacattaccggctcagcggggccggagccggtgtaggtgtctttgggggcatcttcggcttcacgtgaagcttcgtaggttgcggagacggggaagaccaagaggagggcctgggagggccgtgggacaaaggctaggagttccggctcgtcgatcgagaaaacgtctgtgaagcctaatgtgggggctagtcccagttggtgcactaggtgggacatcacttccggattgttttctgggattggggttagttttggcccttggatttggaggttttggggttggggttggggtcgaacctagtggcacaaaggccttttgagtgggggggacatcgacgtgtgccattgtgtttgattttttggtggtgtgtagataggtaagtgtgtatgtagtatgtctttgggttaaggtgagggttagaaggattgcggggttcgggcgtttccacgttttcctgcatgttcgatgttaattacggagaagacttataattggttttattggctttaatcggctctagttgggctctaattgagtgaaagttcgttagaaacagtattagtctcttataaagtttagacagacaaattgacaagagaatataaaaataaatctgactctccatcgggctggagtttccaaatcaggagcatcccagagcctgaagaaacaggctgcaatgtatgtttgcctggtttgcagcttacgtgtggcgcgtttaagagttagctaggtaacactcaatattaatagttagccaccgatccttaatagatcctcaatagatcctaataacagatccaaccggctaagttgatttgggtaattctccactgacctgtcaaacagaaagcattcagatcgcccatttctcgacagccttaaaaggagggagttaatcaccgaggaggcaccgaacttatccccccgtcccaaagtggatgactaaaagtggacggctctgacaaaggcacgcactaagtgggcggctgcatactccgtgctcgccggacccagaaagccctttgttattcaagacatttagtacggagtacacgccgttagtgtcgggttgatgatcatgatcgccactttgcctgctcaaaactatcggaccttccgaatacatctagtgtcccaccagtaacgatgggattggtatctgatttcccgtcggacccattccaatttcggaggctcgcaggaaaatggaaacggggcctggttaaacaaggctatggacataagattaccagatgctccatagcgtcgacccaacgacatggtagcttttgttcacccctgccgataacttcccgagcactaggaatagtgaaacatcggtgggacttctcatggagaaaaattgggtttttgcgagtccatgtttctcctatacgccatgcttggaagtcccaagatcatgatatttcacacccgtatattcgcgtgacctgacaggggtggtgcaatctagcggctcttcactcagtttatacgcgtggagaaagccacgactgttgtcgatcaccacgaggtgggcttagtgctgtttttccgtggagaccaaaaaagcatctttgacaagctaagggctagaagggctaaaacgttctagttctgctttactcgcccctgtattttgtggcttctcgtggcccgtgacataggagggtgttcttttattaagaatccttctccaccactttgaaatccttccggtatgacaggcattcaagatgacagacgaacagcagagaaaaatggcatgccagaccgtggcagcggtctttctgcccattgccactataacggtggcgctgcgcatatatgtgcgtggctggatcgtaaaggcgtttggatgggatgatggggttatggttggcgcaatggtatgttcaatattcttcaattcgagatctttcccaaaactgttctgtggggttgtatcagagtcagagatctaacaagctctaccccagttattctacgctatgttttgcgggactatgattggaggcacaatatacggcacaggttatatgcttgaccacctcactgtccacaaccgtgtcctagcaaaaaagtactggtggctctgcgagattgcctactgcttcgcctcggttggatgcaagatctccgtctgcatcttcctcatgcgcatcactatcaaacccctccacatctggatcctctataccgtcatgctcttgaccgtcctagcaggcctggttttcatgttgctcatgctcctccagtgtaggccgctgtcatacttctggtttcaagtggcacgcgacgctagtatccacggcaaatgcatggatatgaaggtcattgtcatcatgacctacgtttacagtgcatttgccgccctgtgtgatttcaccgtcggcttgttgcctatcttcctcgtccacaatcttcaaatgaagcgccagaccaagatcgccgtcatggccatcttaagcatggcttgcatgtatgtttcaactcgggtctccgtactagttctggatcactgacaagagattccatagtgcttcatcggcggttatcgtccgtatgcccttcgtcaacggattctacgaccccgatttcctctgtatgttccgactctcccgaaaacaaggccaacgcacgaacaaaactaaccaaatctttcactctagacgcaacataccaaatcgccatttggtccaatgtcgaagccggcctcggaattacagccggcagtctcgcaaccctccgacccctcctccgcatgtggacgggctcccactcagatccatattacaataacaactccgggttcccctccgcgttccccggcggacgctcacggtctgcctcgcgccaattgggtggatgtgataaccgtccgtttcctttgggctcgctggatgacagcggtcatcgcttgagaccggataagcttgctgtcactgttacgactatccacagtcagagggatcctaatgatctttactccacgagcccgactagcagcgaggagaggctgacttcggatcggtcatcgcctcgggatattgggttggggattcaccgcacgttcgaggttacgcagacttcaacggagaggattgattctgaaaggatagctgtgagggaacatgtataagtgacccacgtataacatgactcaaaataatatatactaatatcttgttatcgaattggtccgttcgggttgtataaagtcattctattgactcgtgaagaatgagttccatcattcattacaacttttggtcatgcctcaagcagctctcttatattcacgaggttgcttcccctgcttcaacggctcaaaaatatccgtccacagctcattggcctcgcccaggaagtatgtcaaatcaacatcggccagactagcatccccatccccagacaaagtctcaagctgcgagatcaagttctccagcccaaacgccttgcccgttgcctgcgttgcaccagcttcgagcataacattgacaacatgaatatggaaatggtagtaagtcggttgatctaaaattcaaagtcagcaaaaaaaccaccaacgtaacgaaatgcaactcacaatgaacgtaaagcttaatctgatcctcctccaaaccaggatacatagaaaccgtagcctccagcaccctccccctcaaatatttcaaccaaggcacaaaactcttcttcagatccctcaaactccaaatatccctcctctgcaccaaagccaacaaatgcaatgacccgatactcttccgatcccagttcaaatccggtaacatcagaaacccatcatcaggcccgagcccctcatcccgcagaaccacatcctcctgctcagtcctgccctcaagaatattaaacacccagttcagccgcccctcctcgcgcttcgcctgcatgaacggtcgcacgtgcgcacggtatatctccgccgtctccgtgaccatgcgcagatgctggtccgagtacttcttgatgtgctgtgcggtgcatggccagatgaggttgagtttgaggtcttgctgggggttcgcggcttccgcgggagtggtcggggccgtgttgttggcgtttgatgacgcgagataccagcggtagatgtcgttgtcgcctaggttgttgactcgcgagattgcggcgtggaaggcttgtagcacggcgagggattccgtttcgaatgccgcgcgctcggctattaggatgccttgcgtgttgtcgattgtgcctaggagggcgattcgtcggccattttggtctgggtttcttttagttcattgaggctgcggggtaggaggtggatgggtcggaccttgtttgaggagcttgctcacttgaaatttggtgattagtgcctctggggcgagcttgccggtgcctgcagagtcggccatgttaagctttcaatgtgggtatggctatgtagttaagttcaagatgttgacgatttactcagctttatcgggtggggcggtcaggcttatcttagatcttcaagctatcagatggaatatatgttgcaatgcctcgatatcagtatataatgctgcaaagttgctttgatgtcagtttcaagcaaaagtaaatgtatatcacaaaattatgctaccagatgcactgatctacagcctgaaatctatagaaatcccccattgactccactctaacccaacaagccctcaggcagtagcagactcctttccagtcttccctgatgttagggttgtatgcatctaagacaatcagaaaagaaccagggcaaaagaataacccgaatagatcataatagatgggaataaaacataccgcgtccgcaaactgcagccactcctccactcccttgacaaaagtgtcatctgccgcaggaatagcctcatgtccccatactacaaactcatcaaaggtcctctgaatctccataatcttcactggttcctcgggttcagcctctgcatcctcagcgccgtcattgtctgccggttgagctgcaggtaacacacggtctgtgtgtgttgcgactacacctatatattttcaatggtataatcagccaattatgattcaattaccgtttttgtatatccggaaccctcatttggatgttctctcataccttgatagccatcaggaagggcgacgcgccgacctcgaagtttgcgtccgcggaaatatgtcgtttgtgtattatctggatatgaagaaatgttagttctggtttgtacattagtctagctggattttctccatctagggctgtctgtcttgcatgcctttttcgtcttgcactgtccaataccgatccagtgaatcaactggcccatcgtggtgaatccggcatggaatgatatttggcacacattgcagagccgagtcattcttctcggattgtgagctcgcttttgcgcaaggctggatggcgtacatgtcgggcattgtcttggttgctcttcgtagaggacgattctgagtgacgaggcagtaacggtataaaccaggatattttctgggcctaattgttttccaatctgttcctatgttgatcaagtctggataagagaggtattgcctgggttccgcggtctgggtggttgcgctaattcttgcaaaagattggacgtgaggcgcgacgcgttctccccgttctccgcgttaagtggaaattcgaggatcgactgcaaatttatctatttatccctacgtatattgtagaagttttaatgcgtttaaattcgtactcgtacaagtaaaaaatacagctaattctcgtggaaatgcaaaacaattcaattggcaatgatcggggtatacatgtacagagtgtctaagcatgtctcgaaagctatatcgaatatttaactacatcaacgcttgcgtgtggtcttcttcttcttcttctttttctggccctcacccttctccctgttgtcggcaatcatccgagcaggccatttcttcaagtgctcccgctcaaacgcatccttctcccggcgatacaaagccatcgtagcccgagcatcttccacactagaatgcgctccgtcctggatcttgattcccaagaactcctcagccaaaatcttcaaacgtggtgatccaccacctgcgatcctccgatatggcgggtgcttgctcgtgtctcggatgtcgcgcttaggatggctgagaaggagaacgtccaaatcattgctgacagcatggccgacgagaatgcggtccttcaagatatctgcgatttctttctgaacgtgctcaagggcccttgcctccaccatgtgcttcggggcaatcccgctcacatgtgtgcgccaatctgtgaccatctccttcggccgcacgtacgaatcgtatatttggtcgccgttgaagttcacgacactgacgcgggcaagtgcagagtcgctgtcgggatttggtccgacgcccaccatttcgcaatccatcgcgacgtatttccctagttcggcactgcagctggatagttagtattgatatcgaaggacgggccaaatagtatggctgtccgtctgtgccctggcacttaccttggtgaacggccttcattctccttgtgacgcgaactcgtctcgatctttggagcggacgcatcggctgaatcgccggtctctttcttatcagacattctcttgcgcttgagggttggtttggcgtctcggttatatggcttttgcttctcggtcaactttcgtttcttcacaatgccatttccagagtcgagctcggagggcttgcgcttggcagtaggatccttcttcaatgtcgcctgcagcttcttccaattactggaaagcgccgtcttgtccattctgtgttctgttggtgagagaagatgggaaagataaaaaaagccgataagcaagtaaattttcgggacccactttttattttgcggatagttgaccaggcgacttttatacagcgccatttggactatatatattatctttacggtttttgattgagtgtttagcgtgtagtctttacttaatttagctgtaagtgcttgaaatatattgaaatcaaacccgatcctaacatctaaccttaggaccacattatatgtccagataaacaaaatgcacgcgcttttagagggaatatgcagaatcattcgtacccagtcttgaaatccttcgcagtccacttctccgtgatctgtcttctggccttgcgtgcctgggtgattggtgtgcgagactcgagcttaccttgaacgatcaaggttcggaatctgtcatccaagagattgccttccggcttcaagagtcgcagagaatcctgcagctcgtcaggaagcaccagctccaacggctgtgcgggtacactatagagcttgttagtcgcaacatggacataggaaatgaaaaaaaaaacgtacgccctcttgccaccgaaggtcttcttacgaagcgcagtctcatcaccagcttcatcatcatccgcatccgattgattctcgcgctcgagctccctttctttgatttgctcggcgatcttgagaatatgctgggcctgttcatctctctttactctcgctgcctcccatttcgctttcccctctgctagcttgcgtcggatggccttgttgcgctgtgtcttggacttccgctcggggcgcttcttgttcagccactcggacttctcgtactcgctttcgaatccctcccaggcactctcatcatccgacttcacctcgccgttgtcgttctgggcctcctcaatcaaacgctgcttctcagcttccttggcctcttccgccaatcgcagcttctcggcctcaaccgccgccgcaccatgtgtctccaatagtttatcccactcttcgaacacagggttgtaactggttccgccgtgcggcactttaacagaggggataggcttcccattggcagcaagcgagatcggggcgtgttttaatgtgctcggctcaaccttgggcttaggcttctgcaggaaatcaaagcgagggtcgtcgtacttgagcgtgggttcagtatcttccgcccacggatcgtagaactcattttcggtcttcttggccagagggtttccctccttcgctacttgctttaggcggagatattccttcttgctaacccagtcgctcttgggcttcttcgtcttcggttcaatgactccgtcggtgacgttcgggtttacacgcttccggccgtccagggcggggatcattgaccgctgggcaaggatttcgtctgacttgaggggtttcttttgctttttggcgatagccttgcgtacgtcttcattaccaacagtatcgagaacgaagagctgatcggaaggcttttccgagatgaggccactagcaggagaagatagttaggatcttaatccacaagtaaagagcagaaaaagagataataacggtaaccctaccctgtgatctcggcgtccttcagatcgcgcaaaccctcctgcaccgcggtgatatcgacattcttgcgccacgccttcttgcccttacgggaagtttgcttgaattgcttcggggcatccacggaggtcgacattgtggaaaacaacagagacagacagtcaacgttgatagtatgaaaatattggcttatctttttttccggtccaaaaaaattctggatctgcttatctcagcacgcgcgggggcggtgatcgcggttaccacgtttaccgcgcttggatgagaactcgcttttcttccgcttcaagctgccatcacttacggcgcgtgaactccctagtgccagtggtcgtcattttccatccttctggtggcacgcttgatcttttactatcgcttttcgaaagtttgacactgcgcttagcgcgatcgcacgccatgcctgtcgtcaaaggaggtgtctggtaagtgccaccgttggaactcgccctcgagttctcgtcgctaatatactcttaggaccaatattgaggatgaagtgcttcgggcagctgtacgtgatataactcactaggaacctctctagcctacgttttatgagcaaaaactaactcaatcgcaggtatccaaatatggtctcaaccaatgggctcgagtctcctccctgctcgcacggaaaaccccaaagcaatgcaaggcgcgatggattgaatggttggatccgggcattcgcaaggtcgagtggtcgcgggaagaggacgagaaactgctccaccttgcaaagctgatgcccactcaatggcgcactattgctcccatcgtcgggcgcactgccacacaatgtcttgaacgctaccaaaagctgttggatgaagctgaatctcgcgagaatgacgagctcggtctcggaggacctggcgaggagagcgctgcccccagtgcggacgatgtccgtcgcctgcggtacgttggttttcctaaagctctgtgttcgtgttgctgataccttttagacccggtgaactcgatcccgacccagagtctaagcctgcccgtcccgatactatcgacctggatgaagatgagaaagaaatgctgagcgaagcgcgtgctcgtctcgctaacacacagggtaaaaaggccaaacgaaaggcccgagagcgtcaattagaagagtcacgtcgactggccgttctccaaaagcgtcgcgaactcaagcatgccggtattaacgtcaaggttgtcacgcggaagcccggtcagatggattacaatgcagacattccattcgaaaagccagctgctcctggattctacgatacactcgaggagaaagaccagaatgaacgccaacgagaagcgttcgatccccggaagcagcaactcgcaaataagagaaagggagaccaggacgacgatgcggaacggaagaagcgcaagaacgataaaagcggcactatggccgcctctgctgcagctgcacgagccggccaaatgcagaagattcgcgaggccgaacagagcagcaagcgacggggtttgaacttgccagcaccgcaggtcagcgaaagcgaaatgcaagatatcatcaagatgggaatggctggggataaagctagtcaaatgaccgccgatgaaacaggcactcgggggcttattggaaattactcgactatcgttggaggaactcctatcagaaccccccgagctgcgccggaggaagatcgcatcgctaacgaaatcaagaacattcgagctttgactgaaactcagtcttccctcctgggaggggataacacacctctccatgagggcagttcatcaactggatttgatggcattgctcctcggcggcaagcgatcgtcactcccaaccccatggccacgccattccgccaggcgaatggcatgggtgcgacacctatgcccggtggtattggggccggtgccacgccattgcgcaccccacgtgaccatttagctctgaaccgggaagaacagggtgcccagctcattggcagcacaccccgagacattaaaatgtacgagaatctcactcgccaacaggtgcgcagcaagctggcctcgctccccaagcccaaacaagccgagtgggaattagaggttccatccgaatccgctgagcccaccacatctatggagatcagcgaagaagatgcggccgagcgtgatcagcgtaacaaagaggcacgggagaaggccgccaaggctgaattcaagcgtcaatcacaagtttaccagcgaggcctgcctcgtcccgctgttctcgatattaacgctttgctgcaacgtgcgtcccaggtcaccggcaccatcgaaggcctgattgccaacgaagccgccattttgatcgcacatgactctcgcaaattccccgtccccgacgcgcagattcaaggccaagcaccaaagttaagccaattggacgaccgtttcttggacgcagcacgagcttctattgccgctgagattgcttccaccgaagcacagctgtccgaatggcaagagaaattcgacgacggctggtcgtcagcacgcgccaagtctctgcctggccttgagaactacgaggatgacgagcaggatcccttccaagaagaacaacgcatgatcgcggcctttgatactgttcaaacttccctctttgatactgccgagcgcggaaacaagctcgagaagaagctgtctttgcactacggcggataccagaagcgggctaagacgctgcggtcgaagatcttggaggctggtgctgctttgcccgccgctataaatgagctggacgctttccgtacactccagatatctgaggagtcggctgtggtccggcgacttgagagactccgggaagcagtgtcatttgttatgcggcgtgagcgagaggctcaagatttgtacaagagccgaaaagatgagcttgatgaacttcttgccgggacgggtacggtcaatggatggcactaggtagtttacttcttttttttctgcgtcatgactacaatatcttgctcttctgtacaattactacctcagtctaatttgacgaaccgtacgcggtcattttctggaagatatcaccgagttatccaagttatagtatgccatgaacagtttgataaagattttgcattgatttagctgcttccttggttgatagtgtccgaatatttgaaggctggggcctctgtggtctcgattccgtgaatcaatgccatgcttcatagatctttatatgaagccacaaaaaaagattcattagtaaagcaccaaccccagcattactattcgaacttaccgatgtcacgccaggctttggagcatccgcttgattctcgtaaactccagcgaaccgcttatcgtacttggaaagagcatccttttccaccaccgaaagatcagggtgagaattgccaagttccaagggaggtagggtctccaggatgcgaatgtagagcgccgtcgaaccatccccaacaaccgtcggatcatccgcattaaccctctgtctgaggcacgcgttgaccttgtgggcattgacctcgtagaactcacgaggcgtgccacggttcgcataaacgtggaagtaaaagggaacatcgtggaacttctcgcatagctcaatgatgttcgttttgtcagttgtccagccatcccagccgtatatgacgaagatgcactcagtcttgcatgtgcgggcttcttcgagagccattcccagatacttgctgactcggctgttggatcggatccggctgtgggcgggctggatgatggtctgcatcttgtgaggacggacgcccaggaaaccgaactgcttacggtgctcggcgagggtgattacaagcagtgagcgcaggtattcgtgcatttgggtgctgttcatttctgcgttcggatagttgtgatctttcaggtttgaggctcgggcgataaacaccaccactggaccgagggggttgggggaatcatgcatagctgtcaaggatgggggttccgaggtggtgttgttaccgacaggaggtggacgaggtttgtccggcgattgcttgaaatgaagcatagccgaagacgatgatatgcgcagagattgagtgaagaggaacgaggaatgatggaatggaagagtagaaaaggaaataccccaatggagatatgaaggtttgtttacgtgtacggtctggtggtgtctacccaaataggaaggcacgtctagaggaaagagcgacacagactggaaaattacatggacctggaaggaaggtggataggaagcgcacattgtaaacatacaagtcggtgagatccctcttggacataactatagaaaagtgacaaaatgatattgatatagacccatttctcacagctcatcgcttcttgatgctgatatcgatctttccaatgccccaggcagcgacaaagactgtaagcaaacccgcaaagatggtgagaggcttgcgcagggcgtcgaccatggagtgatcgtacgtaacctaatggcgaattagcataattgcgagatgaacaagtgacaatacgattagtacataccacgaacttggagtcgcgcgcttcgtcagtcagactgtcaacctccagggtcaaggtggtccggcccagagtatccatgtaggtcttgagagtgttcaagtgagcgtaaatgtgcttggcaccaggaagaccattactgttagtcccctcaaggagctcaaaacgaacattgtgagcaccctcagggagcacaacgcgcacaatcacacgctcatactggatgccctcagccatcttaggcccctcaatgaacgggaccttgaggacataggagtcggagtcgacacccgcggcacggcgcaggaacgaagcaaggtcattgttccacccaatacggaagctgtagttccagcctccgaagatcggatagcggggcttcagctccaagttaccggcgctcttaccaacactcggacggtagcggctggtcgagacattgccgatatcatcaatgaagtaaggatcgacagaaccaggtagaagcggatatgttagctcgcgaagcgccgaagtaggcgctttctggtaggaggtgaaggtccactcgacacgcgagaactggttggtcagctccgagccgttgttgcgcagccagtaccgttcctcggttgcgaggttgccgccccagtgcgagacttccaagtcacgctctaaaaggtttacggtgatgacaggcttagtgaactcatagcggacggtaattgggtgctccgtgcccggggccacctcggccgtgtcatacggaccgtaggtgtatgtggtgcccttgcgctcggggtccgagccggacttgagaccctccgtgggtgtataatccggcacattgttgctggggaacttcaacttggttttctgtgtaaccgtcgtgtaggcggatggcatgtaggcggagaaggagtaggtgaggaattgcttgtccgcctgtccaatggtggcaggaagtgggctgagagaggaaagcaccgagtaggagattccaagggtaatctgcgacttcggggccagagactcgggaaggtgaacgacgaaatactggttgccgctgtttcaattgttagtttaataggcccctgacatggccattgacctcccaattgatactaactcagatggtacagctttggtatagtctacatcaaagcgtcctttctcgggggctttcttatccctcacttcgaagcctccaacacggtcaaacacttcggcagggaaggggatgtagtagtcgttctggggctgcttgtcgacattctccacaacaacattgatcgtttcccgtacataactcttttccagattggtattgcgaaccaaatttatgtttttgaaaacctgtgggggcttgaagccggacggaagatccaatcgactaggcgtggtaaggttggttgcagcgcacaggctgggcgcgagcagcccgagcaccgtggcggtgaaaaacctcattctgagtacctggaggacacaatttctccgaggttcaaagggttcaataatccaagatgtgattgtgtctggtcggtgaaccttggaaagcttgcgcagctgatgatacgtggtccccattgtatactagggtcgccgaagcggccacatcgcgcactccggcttatcgctgataagggcctagctgatcgaagcttctcctcatctcgcatctttacttcttgcatacttgatctacttgacttgcaggttgagattggctggaggcacagctgaaacttattttcatatatcatcatgttgtcacacacgatgtttgcctctcgagctgctttaaggtccggctgtttgaggggaacccaactgttatcagctcgtcgctaccatggccttgcccagagcaggttcttcaaggtgtcagacgaggtgcgtgatgcaattgctacaggtaaaccagtcgtcgctcttgagacgacaatctatacacacggtgagtctttctgcgttcattcctgggattgaagagcttcgcccaaaagcggggaagccaagactctaatcagctgtaggtttcccttatcctgataacattgctctcgccgcattgttagagtcagtcgtgagagccaatggcggagtgcctgcaactataggaatccttggtggcgttgccaaggttggtctgagtacggaagagcttatcgagctggcctcgacagctcaagagaagagcgctctgaaagtgtctcgtagggatctcggatatatctgtggcctagtgagttagctgttgcaatggctcagagaactggaactgatatatatcagggcatggttggtaagccaatgcacggcggtactacaatctcgggcactatgatcctgtcagaactagctggcatcaagatctttggtaccggtggactaggtaaattcagtgatcaaagctcaatcgaaaaagaagtcaatctgacttgccttaggtggtgtgcatcgcggagcagaaagctcaatggatatctctggtaagagaaccgtgaagcaaaacaaggatccccattattgacaaatgattatagccgatcttactgaacttggacgtaccccggtaacggtgattagctctgggtgcaagagcttcttagacatccctcgaacgctcgaatacctcgagaccgaaggtgtctgcgtgggtacattcgctgatggccgggatggtgccgttgatttcccagctttctttacccgagagagcggcattcgcagtccccgggtcattcaaaatgaagctgaagctgctgccatagtttgtaagtttaccccatgtgttgaaagctacagcctcgttgacggaatctccagatgcgcaatcaaagcttccagtatcctccggcattcactttgccaaccccgtccccctggagcactcaatccccaaagccgagatggatagtgtgattgaagaagctatccgcctttcccatgtagagggttaccacggcagtgacaacacgccatttgtgcttgctaagatcaaggaactaagcggtggaaagagcgtagtcgccaaccgggccttgattgagtctaatgtcaagcgtgcaaccctagtagctgtggaacttgccaagcttgaacaagctgacctaggaacagggtctcggtgagttttgtttctagatacgagatacgagattcaaccaatgctaagttcttcgatctctatccctatagacacatgccatcaatcccaggtgtagcttttccaagtcaagttgcctcccaagttgaagatttccccgaaccagccaccgaggcacctattacaccaacgctaaaggcagatgtcgtggttgccggctcgctagccatcgacttgtcctgcgactacactccattcggagacgaactcacacaggttgcaccagtaccacatacctccaacccagcaattatcggacaaagcctaggcggcgttggccacaacgttgccattgccgccagctacgtcggcagcgatgtcatcttctgcagcgtcgtcgcagacgatctcagcggccgcgctgcactctcaacccttgaaaaagaaggcctcagcaccgcaggcattcaagtcctcgcagcgacagcaagcacccgcacagcccaatacatcgcaatcaacgacaccaaaaaagacctcctaatagccatggccgacatgggcatcatcgagctccccgaatccggactcgacttcgacggcttctgggaacctctcctcgaacgtacaaagccaaactgggtcgtcgtcgacgctaactggcggcccgacgtgatggccaaatggagtgctgtagcacgcaaacacggcgcccgcgtagccttcgagcccgtttcaacagccaaatcccgacgcctattcggcaccggcgcgactatcggtcccaaccagatcgtgccaaataatgctatcagtcttgcgtgtccgaaccgcctcgagctgacggctatgttcaatgctgcgcgggaagcatctcttttcgagtccgcggaatggtggcatctcattaactccatgaatatgtctccgacgggctcgcgccagcaactcattgcgctcacttcgctatctctcgttgacgagggcattccgcagcagactgttcagctacttcctttcattccttgtatcgttactaagctcggtggtgcgggttctctcctcactcagcttctgccgcctggtgatccccgtcttactgatccggagtctgcgccgtatattctttctcgtgcgtgggggccggacttgcctttcggtggtgtttacatgcgtctgttctcgcctgatactattctagatgccaaggacattgtcagtgtcaatgcagcgggtgatacgctgctaggtgtcgtggtggctggcttggctaaggacccttctgtgcgcgtggaggatgtcattcctattgctcaggaggcgagccggaaaacattggctagcgctgggggtgtgagcaaggaattggttcagctgcggggcttattggggctgtaataggtagctgtgaccccgtactaatgacgttgattgcctggatcggaagtcaactcgaggcactagcttgctcagcggtgcttggccaagatctataaaaagaaattaatcgtttagacagacatcgtttaacaaagactttatgacttaaccgattgcaggatgtaaaaaagggatgtgctgttaagacgtataaaatcattgccatgttcattaagtacacattagttagtcgtggacctcgccttcagtggccgagcgaggctcccatcccattttagccatctcaaacgactcgaataagaaggccggcgccaccgtacaccccacgagtgtccaatcacctagactcctcgcatgctgccactctccacgctcaacgatagcctgtggccgttcgccctatatcataggaattaagcattgccaagtggagaaacacgcgaccatatatataaagaaataactcacctttgcaaaatcaatccccaaaatcatgtcccgggtgggtttcccatcatcccaggatagtgatagttgcataggggcgccagcgtagtaatgccatacctcagtgccatcgagaacacggtgccattgcgagaggccgctttctccctcgagaaggtaataaatacaggtgctgtgcgagcgagtgtttgatgaatggcgatcgcggaaggtctcgacgtagtaccctttttctggatgtggggagagattcaaggtcttgatgatctcttgtgctgaaatatttttcgccatgctatctagagagtagagatgtgcttgggttaaaagaaaggagacggtgaagtcaaatatacatttgtttccctatcccctcgattagtcagttgtggtattgataggcgtctgcatgcttctctcccctctccttagcaaatcacatctcggtgacgtggtgatacgatgtagatctgagacaaggttaataagcaaagcaatccagctgaaacatgcagatagatgcaccagttggaggcatcagaatactttcacatccttccagttgaaccttagcccggaatcattgcgagctgaacattacgtatgggcaacatatatcatggacattgatgaagtgactcataaggttagccctacgttcccaaaatactatgcgaactgtctcgcccgcaaaagcttcgaggggcttatcctcgtcagcgcggccacatgtccgttgaggatcacgacacttggctcctctcgaagcgcatttgaatacgaaaactccactcccgataagtatatcgttttgataatccctattaatcattatgcagtcattacaagacagagacacctagtgctaaaacactaaccaacgctcaatatccttcgctagcttttgacgacggcacaagtcccggatccaacagtccaacctgcactagcacaccagcctggtcccaataaagactctggcgtgtaatctgaccagcactgaaggttgccactacaacgacaatgacctggatatctcgccccgtcggcgaaacaccaggtagcagccatggaatctcagcagtatgccgacaggagaacaacatctcatccacgatacgatccacacctacagtgcgtgacaacaggcggatttgctgatcaaccggtccagcaggaatatacgcatgagcgaagaaatcccgcaggcttgcgatatcagagcctgtaatatacatatcagtaaattcccgaaccagatcgtaggaaataaaagaggaaaagaaaaactcacccccagcctgagtaggaatacactttacaaagacctcaccagcaggacaccccatctcgccataatggccatgaccggtcaacatccccaccgccggctcagcaccagaatgctgatgttttttccgcatctccatctcccccagcacacggtcccagtattcttcccagacagtctcgatatcaataacagcccattggctcccgacattgaacgagcggcgcagacaccccagcgcgcgactccacgccaattgcgagctgatctcgtcatctgtgttgaggtccacatttatctcgccttctttctcctcggcaacttcccgctccgcgaacccggctttggactccgggtacgtgtacacgtggcatcggtgctttttcttgtaggtgacgtcgccttcggaggtgctgagctcgatccatggccacaacgcgcagggctggactcgtgggcctgggatgtggatttggattgggaggtatgttgacttggcggctgggccgaagattgcacctgtgtctgagcagcctggtggcgagcagttttctttttccttgtaggtgaattggtcggttgaggcgagggggtagtaggctatcaaggcacataggtgtgggaatgggtttgtgttgctgtatactatgtggtgtaaggctaggaggaggtaggcaggtcggtgatatgctggggttggttagttgggttttgctatatcttgcagggctgaggtttctgcttcgaataacaaagcatatatagaaatagacaagaaagtataatagaagacgtaccaactatcgcataccgctctccattctcgagctcatcttccttttcgtgcaccgcattcttcagcgctttcatatctctctcttcattcccgctgccgaggaacgggatatagatcacatcgaatccttccccctgaaagaggtggactacatgggtatcgaactgcacagtgtcggagatcaggatgaggtgtcgggaagatggctcttcatatcgccagctgcgtgtgccggagctcgtgctcactgtccgacgtattccgtgcggatgggatgccgcggaattggggcccgtggtgtctgcgtctaggtctggtgggttactgctggagctttgggctcggcgtcgagtgaggcgttggaatacgttgaccatagtctgaatgtggttgattagatgagctgtatttatattgggagtttaggaggacatgtagtccttttatatatggaagtttctgcttcgtttcgggaagctcgggttggagttcttggtattacatgtgtcaagacgagaaaatagatgccaatgcttagggtttcttgggtgacgtcgttgatgttgcataccacgataagatatggtagggctgcacatcttcatgcttggaaaaagcatctaatagaatctagaaatgacacgtcaacaaaaagatccttcttctatgtctatacagcgaaatgatctgcgctatagggaaaataatcgcaatgaaggatactcatctcgccaacccccaatggcatgatatatctgaccccacttaatcaaagctcaccaaccacctacgatcctcgctgactttctcggatgttttaccgctgtcaacaagatagcacttgtaagcgtcgcgcagcagactctcccgcgcaacctcacaatccacccgaatatcctccaccaacgcctccagcgagacataatcaaactcaggccgaatataacccagaatcagcaggttgagtcgcgttttatagaaatccggcaagcgatggaacttagtatggccctcgtgccccgcagcggtgggcgatggttccgtgagagcgggcatgatatggatttcctaaagtggacaaccacgttagtccgataccccaaaaatacgagcgcatttcgtctagtttattgtatatcacgtaccacagatcgcacggtatttttatagaaagggttatatccgatactcaacacagcaggcaaaaccaccgcagtggatgtgctgccctcggctgtttcatgtttgtatgttttcgggtcgagcgctacaacgccgaagtagacgccgcttgtcagctcggggtgcttctcggacaggtcgtcggcggggatgttggcagtgggaattccgagctgtagtcatccgggagagcgagtcagcggtaagttcattgtgcgtgttgcgctgcgcgattatagcaccgaggttgagtccgcagagtcatggacgtacgtctttgctcccgcggccaaatcccttgatcactggccctgacagtcgcacaggataaggaggttccggggtatcggggccggctacccggtcgcgcagcttggagcccatcgctggcggttgaggttgaggttgtgtggatacgggtcaggcttgggatgtggtgaagcgtgtatattggcgcagacaaatctgctaataagtttgttttgtttggcgtatactgattgtgtgatttagcaatggtttggcgtgatgctggcgttgagtgtgtctgaatgcgaccagccctggtgggggttatcgcgataaggatgcattgcgtacataattaaggcgcctggggtatcaggcattaaaccacatgtaatctcgcaaaaagcggcaagcactaaaacggaaagggaacgccaagaagtggcagaggaaatcaagtacatacatagggagtagatatatatttctactacattagactaattacttcaacacttcaacccaagtacattcccgtctctcatgtcctcagatcgtttcagatcgtcacatacaatgctattagtaccgttccggagtagcaagacagtatatacctacactagcaaaattaagtcacttttgtcaaataactactttatcatctgcttcatcgtcaacttatttaaatttagatccatggatggttcaggactcaacgaggtcagaagtgaccccactcaatatcatggcattatgctcatacagtaactatcccgtcccagcttttgtcccattgtcccttttgagcgccacaaataaaacaagaaagcatatcgacaatcctggaattgattccaggaatccaagaagcataacttatatacgagaacatagaacatgagaagaccctgtcggccagtggtccaaaagaaatcaagtccaaaggggatcatacaatcccagaatcaggaaatatgtactgagtagaacagcagaagaaaagaagacaggcctgatgtcaggccttgccgagggtatgaaaaggtaatctgaaacaagagcaggaaacaaaatcaaatgcatggcaagaactggaagacagcggattagcatgtaatcaacttcaaaaggtcgtgtgatattaattagaaactcacattcatcacaatgagcatcgggatatcgaacacatcgcgtttcactgtccagcagtacgcgcattcgacttttccgtccttgagaccgagctggttcatgccagcctcgccagcaatgccactcttgcggaggtggttgttccactttgcattatcatcagattgtgaaacgtccatgtcctccttggtcttatatttgagcagcttgcaccgagtcatgacactaccacgagaatcgccgaatgccagacgcgcaaagtcttcgtagaactcgacgacgctgtcatcgtcgagtagttcggccaagaacactggttgggggcgtccagtgttggcatactctaatgtggagccgcgcggtgtgaaactcccgcgtgacgttgtcccggattggggtacgcccgaaccggtgttgacgttgaggtttttatcttttcctagaagcacgtctttcttccatccggttaggatgctgaattccttgcctacggcggcgatttcgccggtgcgtcggcagacgatggtcggcgttccgcatgcattgatgaagtcctcgtactcccagagagttcgctggaagcatttttccatgaagatgagatcatcgcgattaagggtcttagtagttgcgataaaagagggtcgaatagatgcaagcgccttagcaattcgcacagtcttttgcggcgaaaagcgacgctggatgaaagcagtgaggttgtggaagccacttgtgtaagcatagggctccttcacgctttcgtatattgaggaaggattgcggtggcgtcttttagaaccaacatgcagatttggatgcttcaggattgatgctgacgtcacctggcgttgtccattcggcaccaggctgttggacttgggggcagaagcgatattgttaaatgtgccatcctcgaatgcagccgttgcaatgttcgggcttggggccgagccaggactagtgaagtttgttggcgcactttcgatcgcaaatgcatgtggtgcgttttgtttcatgtgttcggaaagcatggcattttggccatacacaccgccgacattcacatgttggcccgaggccggtgcggtcgaccattcgtttaggagaggatcgccaaacatgaaaggttgattccccgggctttctccgaaaccgggagctggtgtagagaactgggccgagccactgcggccgatcgaccctcgctgtcctgcagaatcagtaggagagtcaccggccgcgccggtggccatgtgcccaagcatgccgaattccagagcaccgtatcgattttcgaagttcatgctcgataaatcgaagttgaagagagctggatcactgggatcaaaaaatggccctgcaaaaggattttgagactgacttgtatccccagagagagcagtacttggagtagcctgctggttcacagttgatgaaagacttggatttcgcccattggtgctgctcttcatattgaaagtaggtgaaacgggtgattgcgtggtaaaagggctttggctcatggaagattcttggtagggattgtaggatgctgtctgcgtctgaggcgtagggtaaaagttgttgctcgtggtactggttgtttggttattgtgttgatgagtgtgttgttggctgagttgctggttggagttgacagcgtttgcgccatttctagatataggcatattattgcggagcgtgttgttgtatagattggtgctgttgctgctggtggtactaacagctggcatcaacgccccgtcaggagcgtcatggagatacttggcctttttgcgaacaccatcatggcaagcatcttgaagaccgcgtttgatgcaacgttgacacggtcgttcgtcgcctaaacccgatatatattagtcagatcgctaacaagggcagggatcagtctatcatcataccgcaagtcaaatgagctcgttggcatgcaaagcaagctcgccgagccttctttcgtcgcggtcgggagggatccttggcattcgctgctttgcgatccgctttgctatcgccattagttttgggctttatgtccatttgctcgtgttctgtgatatcggcagagtcacgatctccactgtagtcccctgcaggtcccggggagccgttcttagcttccatattcatttcggcatgtaccccgagaacggtgatctatggacgcgtccacaaaagtgagggagatcggtgtttcagatccagtaggccaccttccgtgccttcttttgttgatctaaagaaacagagcgtggtggcgacaataccaatgataccatgagcgcttcgtttccggcgggcgagcggatccacgtgcacaatattcagcccagcttgtgagtgggaaaaggaaacgatcgcaaagtcctaatcgtccgtgtaggttcttgaaatccacccaaatcacctctcgaaggttggagagatctccggtccttggttcctataatcgcgcgtttgcgactacagttggtggggagtcggcaccggaatcacggcgagtcgagtcacgggtgtaacgggggacaatcgactggagaagcgacggatgtacgatgatctgacacattgaagggtttcaatgtggtgggtagatagggagaaactggcgcaaagctaacagcagaaaaataccgcaatggttcggggctggagtggagtggacggcttcgttcggttgcggggaaggtgtgaatttctctccaaacacgagagccgtgccgatgcgaggccggtcgagaagctcaaaaggaagaaggtcgagaggcaatgcaaatattattcgcgcggagggttgaagaagaagcggatgattctaagaagggctctcgatcggagtgttcccgtgactattgtctaagcaacaggactctaacacgacacagtccaattgtaaaggacttgtagaggactaactgagactcgcttgagcgatggaatcctttttttttaatccttttttgtgtattttttatatatttctttcacaatggcttttagaattttggcactatatttccctactaaaaaggcgcaagactatacttagagtatgtactccgtaaaaaacagccactattttacctgattaatttttgttttttttttttttgctacccaacctaatctcacgttgggcgtgtcttaattgaaggattatctctgatcagaaatcctgcgagtatagggttctataagaaccaaagggctctaatatgtacatcatacattcacatgctgacgttcagggcgacggtcactggaggcattattagttatgtatttgactatgccaagtattacggctttcataacattaccagaaacaacctgtaatttaagtgcatccacaggctctgattggttgaactacaatccaataccagatcgggttcagcgcataccagatgacctagacaattagtagccccgcggcacgtgcctaattcgattgtatactctgtgccttgttagcttctaaattacccaacgttcaatgcaagtatatccaatttgagtcattatttttttctgtcaagctgaatcgatcccgagaaacccggtccagactttccacagttctcggcagcacgctccgattccgttttgttccgaggcagactggatgcgctctgccgaggctagaaggatcgcgacagttataccgctcagctatgactgtacttttaaaggagggattgtcatgtctgcttgccgccaggggtaagttggttggggatgattgccggtgcatgaatttcaagaccacatgaccctcgtatgcttcgcaactggactggcagactgggggtcccgtcggagaattaaagcctgggccaggtccgcctagtttctattcttggcgtgggtgggatctatttacccctagtgtgtatataaaccccgctagtacatagtatgaaaagctataggtctgcttgagattaagaacggctagatcgaatatgcaagatgcttatatggaatcaaatagagctaggatatagagcatatccttgccgatcatgcgtattattaactatgattttatgcattggcttttacactgcagacggtacagcagctcaaagcgttatgtcctgacatccccagtagccaaacgtctcagcccaaggggttcccaacatctggtcatggatgccgtgttcatctccttggcgcacggtgttcaagaccggttggtaaactgttgagatgcaatggcgccgagggtagacctgtgtcctcgcgaaatagccatgcagccagcgaccaacccgcttgagattaatgtatgtatgggttattatatgtgcaccgcagcatcaatcacgtctgtgatttcgcaaacttgcttttacttcggatccatgccccatggcgaaagaataggtatctatcatcaatgtcagtacaatgttcggcagacagatcaactcatgttaagttattgtctttagatccacaaggaagctgggatgtcaaacttccatccctaaggcgacttgctggggtttcataatgcagggggaagaaataggtatagcgtaagaggaaatcaagtgtgtcaaaatcagcacgtacggaaaagggaccatgacaagggtcaggaacgctaacaaggaagttgcccattgatatccaaggttgtggtacactgcataaccgttagccataatcgttacctcaactgtgtgcaggcaagaatgtagctgtcaagcattgcagaagagctactggtcggcctgttcagaatacagcgcatccaccgcattggaaatatgcgcttcatgcaaagcacgggcttccaattcttatcccagcacaacgagagtgtagacaaacttactttgtattccaaatagcggaaatatgcctccaaaggatgaccgagcgaagctgttcgctgctagagcgctggcggcaaaagtcggatatgcatcgaccaggaatgtgaagatacccgagtagactaggatcgtcctagcagtaacacgatccaattagcatcacgcggccgaaaaatgcgcagacaaggatggtcgcccggctaggtggggttgaaaggttgatcttaccctgcaccaaaaacagcactgccaataataggcgcaatccaatggacgttgggatagattgtccaagcaaaaatgaaaagacctatagtaaccaagggtcctcccaggatcgctattccatgaaagtcagccattatactcttgggaccttggcgcctgagcaattatgttggcaaacttacctgggggcagtcgccactctggctggaagtcatcgagcgagttagtggtttttctgtaattgcgctccaagcgaatgtagttttggcgccagatcggatctgacaaaatggctataaccattccgacaaacagaccgaggaaacacagtccacgctgccatattactagcccatacacatcattgaagactagctggaaagcaccaaagaagaggtacagaatacccaataggatggctgagaaaatgcaaaggcatagacacattggctccaatgttaagaggagaacggggcggtacatggatcgcagaactgtctgggtcacagaccgctgcagcttttcgattggagctttccatcgctcgtctccggtttccatgcgcagcttctgcgccttacgcctcaaaagtctagaacattattagcgtcgtgatttatcccagaatctggaaatacatacactgggtgataggtctctggaacgaagaatataatcgaggcgagcatcactcccgtccaaatcaagagcacataaaacgtccaacgcctgcgagtgatataagcttcaatagttgtcagaattcaatataaaacataccatgtggtaaatgcattaatgaagccaccgactctggtgattatgttagtattaagatcagagggtaggcaaaaagaacgacctacagaggaccaacttcgggaccaacaaatggactcgcagtgtagagcatcatgggaaaggcaagctcatggcgatcaaacatgtcaccaacagtgcctccagcaacactcaaaaaggcactgcctgacagtccagtgaaaaaccgagcgataatcatggtctcagtattcttagccaccgcgcacgggataagccaaatgagaaagagcgagtacgaaacgaggtagatgtttcttcggccatagaactaagagaattcagatcagcaacgcaatatctagcagccaaagtctcaaacgtacctcagataacggacttagaaagagcggaccaattcctaaagcgaaaaacatcaacacatagtcccgcgtaagacgacaagatcagcacggaccaagaccccaaataaaaaacgacaacccaagagtcgcgacttcctgcgagcatccgaattcactcatcaattggtcatatgtcgtggtatacatcgaagaggcacaagtcctacatgcagtaagtcagcttctatgcggcgcagagatttcaagaattaaccggctgtacactcacacgcaaagcgaacccatcgagataataacaacaaccaaccatcgtcgggctttgctcatattgcgcggattcataggatcgttctcctcccagcccacaatatatgattcatggtcggtcgccaccgcagcctcgtcaacatcatggctggcaacgctgacgccgtcattcaatgaccagctgcgttccaggggcttggatgtaactgatctagacgcgctcgagcgtagttttcggagcggtgtgctgccttcttcgtgagtacccggggaggtgatcgcagcataactcagatcatcggatttggtgcggtcgaatttgttggcactcttaccactagagggtccttcggggccgatgcgggttttttcttcgctggggtctgggtgcgacacgtctgtacttgaccgcggagacatggtcaatgggcaaacggtcaattgttagatttgatcatctggtaagtctttgtgttatctatgaagtcataggaaacaaatcgaacggtatggagctacctgggtgtatgtattgattagcggaaatgtgagtcactgtcttgcgagggaaaatgaaggggattctccttagcgtctagaaatcaaattcaacctcgggacttccgagctgatcaatcagtttacggggtcctaattccgctatctcgaagccgacctcgggagtgattccgccttggacattgattaagtgtaattctaaccatatgtatgtaatgttgtagaaaattcaactattctacaactagatagacatatatcgttttcaatgttttgactgtgacattagttatcggatgccaagaacgtaaacacgtgggaacgttggtgcatgtcgcacggagctactccgtactccgtatataattctccgagatcgtaggtctaaaacattgcagacaagaacaagatatgcttgagacagagatatgttcaattaagctagagctaaaactactacggaacagaaacaattcatcaacgtcgcttccaagggaccaggtgcccaaacaaaaacaccaacaaaaggtagtaaccaaagtcctgtctccaagctaaccctaaactcctcatagccattcgaccgaatgctattcccaaagaaaacaccggatctcaaatcgagatattacggaaccatcccaaagttgagctgtacaagaaaagaaagatgcgccaatagatcccagaattttggccaagaggacacattctctaaagagcctggctgagctggcccatggcaccagaagcgttttcctcggcccaagaaccccagagtgcctgctttccagtgaccttgagaggaccaccaatagacttggcgccctggtcaaccttgacagcatctttcgtggccagcaccaagatttcgaaaaacattttggtagcatcggccttgctggaccgctgctcgggaaggagctcctggaacaaaacgctcttctcctgctgggtggctgggctaccaagcttctcgcggagaatgtgcacagcgtgcttggtgcccattgagaccggttcggtatcgacggggtgcgcaatagtatcatccagctcatccatgggctggttgttaccgtcgtcctcattcaagtgcaatacatcttcgtcatctccagggaattcaatctcagagcgctggttcatagtggtatcgagagcgataccctcgtcaatcgggaccatggcttcctcgtcaccaagatccagggcaggaacgtcgacagcagccacatccatatcggaaatgccactatcgcgcttgcgcttcagctcaccggctttcttgacggaatctaaagagagcatgccgcgtagctcgggtgcccatccgcgtccacggtcctcaccaaacacactagacacaaagttgccattctgctgtctggtcatcagagtgagcaggacggggtcgcgtggcaagaatgatgcgggcttcaaaatcgaagagcggtcattttgctggtccttgatcttggagctggagatcgcaacttgtttgtcgagtcccataagcttctggcgcttggtgcgctgaccctggtgggcgctaacggcatcaggggttgcggatacatctctgttaatttcctcttccagctgatttatctgatcggatccagcatcggaaagggggctttcggagtcacgttcaaatcggttttcggcagcacggggcgtctcgccaccaccgaagtcgttatcgttgttgaagtccatgggaccatctggcagtaggtcgttcaggttgtcatggacatcatcgccaaggtccatcttgtcgagagcctcatcatctccaaggtccagtccgagatcgtcgtcgtcgttgaattttccagcgtcattgaacagatcatcccctacgggacgaggcgcgggagcatctcgaccaatttccatagtcgggtcatttccaaggggcaattcatcgtcgctgaagttaagatcaacaagggaagggtcttcaaggcgtgcgggttcctgagaaacagagcggcggaagctgctgtctgggaggaattggcttccaaaatccatgccaccagggcgcttgccagcaggctccagatctagagtttgagggaagagcagagacgtatcaaggttggtgaaaagatcagattcagtgagcacgtcgggaagagtaatgccacctggagcgacgacagtcgaagtcaaatcattgttgtttgtgagacggaaagcctgatgtatcattagattgaaccaaacccccatttatgcaaaacaatacgtaccattttaattttcatcagagcttcattgcaatcgtcgaggaggtagcgagccttgcggctataaattcgaaccacacccaacagcaattgaccacttaatcgcagagccataggagcttgaccctgatcaacaatagcattgacactgctctcaatatccgattgcaggatatgcgactttgaaagtttgcgttcgatattagccgacaaccaaacgcgagccaacggcccggttttcgacaacagggtctcggaatagaacatggtgtgtttgtcgcaacgagatcttttacaacggcgagatatctgtcaccaaattcggtaggcgaaaaagacccgcccggcgcgggggtgaggtgtagaaaggcgacgcgctgaagccgggaaaacaatgacttgtgcgaggattcgcacttgataattgtatgaaaaggtagatatgtgactaagagataaaggtttatcactcgatcgcgtgaaattaagacatcgaagagggagatggagagggtatgtgcgcgggagggatatcttggagttggctgagaaaccaaggaggaacggaagatgcgcgtcggtgggaatatcaggcggcaatggcctgggcgggatttttgctgacgtaatcgagggggctgggaatgtcgggtcacgtgagggtacacaaaggaacttgtacggagtccataccccgacgtatcacaacaatgaatttgctacgaacgaaaatttgcctcgttaataggcaaatatggaagagaatatcaattggactttttgtttctcaccaaaccacagaaaactcttgtataaatcagtgcatcgtatactctgccctacacgtgataccttgcgctagtcttattatagtatccggataaactccctacccgagatagctaggccacaatgggtaaagcatcatcatggggacttaactagcctcttccaagtggactcggtactctgaatgggaatattttgcggttttgattttagcaaaaagctgtttcaaatcccgtttttggtcccaggtcctctgtcggtcccttgtttgtcgtcgaccaacttgcgccgactccgcaaatccagcagttagttaagccgcccccgtgtccacgggtgaatgccagatcgcatctaacgtttattgtcgaaacatagtcaattcttacccaaacgggatgaaaactacttctcaacatatctaacgtcatattttatcgcctttaattatccatcctccaaagcatgagcaatgtcaaggtccgcgacaccttcattgcctttgcataatgcatcaaacagcgactttcttcgaccttcctccacaacagccatgactggacggccaaatgctccatcatcagtaagtatacttgactcacgtaccacgtgtgctgcccttcctccacttcttcacgccgtcagacaatggagtttctaacacatggtcttgttttcttccagacatccacttccacatattcatggctcgagcctcatgaaactgccgagcgattacgaacctctattttacatggcctgacacccgtcgaggcagagatacgcttggccagagatggaccgaacgagcttcctcacgatgagccggaacccctctggctgcggttcctcaaacaattcaaggaaacgctgattctcctcctcctcggctctgctggaatctcttttgtgatgggcaactacgacgatgccatcagcattactctcgcagtaacaattgttgtgactgttggctttgttcaagagtatcggtcggagaagtcgttggaagcattgagccgacttgtaccccattatgcgcatttgatccgtgatcttccaacaacttcctccgcggcaactgagaatggtagtgcatcgcccgcaggtttctccatggaaatggatgaacttcggagcaaaagcccaggctcggcgtctgccgcggtcaaggcttcttcaaccgtccccgcgaacgaacttgtacccggagatttggttcttttcactaccggagaccgcattcccgccgatattcgaataactgctgcaacagacctgagcattgacgagtcgaacttgactggagagaacgagcctgtagcgaagtacacggaagctctgcgcaccacatctggcgggaccgcttcagcgccaaaaggaatagcaccccctcgatctcccttctacgatgcaccggcaagcggtgctgttggtgctgacattcgattgaacgagcagcacaatgttgcgttcatgggtaccctagtccgctcaggctatggtcagggcattgttatctcaaccggcgcaaatacggagttcggcagtatatcagcttcgctacaagagattgagagccctcgaacacccttacaactgtccatggatcgtttgggacaggagctaagttatatatctttcggtgtcattggattgatcgtggttattggtcttatacaaggtcgcaagattctcgaaatgttcacgataggtgtctcgctggccgtcgcagcgatcccagaaggcttgcctatcattgttactgtcacgctcgcgctcggcgtcctgcgcatggctaagaggggagcaatcatgcgaagactgcccagcgttgaaactcttggctctgtcaatgtcgtctgctcggacaagactggaactcttactctcaaccatatgacagttaccaaaatgtggcatttcgactgcccagaaccattcgacgtgcaaagagaaatgacatcggttacttcttttggccctgcagcgcaaacaatcctgcgcgttggtaatattgcaaacaactctcgtttgtcacggatgcacgcaaactcgccagccagcgcatcttctgcgactgtactttcgtcgaccatcaacagtgattcggctgctgccaagagtcgatgggtgggtcagcccactgatgtggcaattttagatctaatggatatcctgggagaagatgatgtgcgcgatcgtatcagcgctcgcgtccatgagaccccattcagctccgagcggaaatggatgggtgttgttatcggcgattctggtggttcaaatggaggtccccatgttgcctatattaagggtgctctcgaacaggtcttggcgcgatcggatacctatctcaccaaggatggtcgggaagtaattctagacgagccccgtcgcaagatcgttcgggaagcagcagagaatatggcatcggagggtcttagagttcttgcctttggcagtggagttgttcgtgatacgtctagaggtggcagaggctttggcagtcggtcgtccccgaaaatcgtacagggtgatgatgacgagcggtacaacggcttagtctttgctggattggtgggtatgaacgacccgccgcgtaaagatgtgcacaaatccatccgacgcttgatgtctggtggtgtcagagtcatcatgattactggcgacgctgagacaacagctgtggccattgcgaagaagcttggaatgccagtcaacgattccccgcatgcccgttcagtcatcggaggcgatgaactcgatcgtatgactgccgctgaacttgcccaggcaatctcaacggtctcgatctttgcccgtacgagcccagaccacaagatgaagattgtgacggcacttcaagcccgcggcgatgtagttgccatgaccggtgatggtgtcaatgatgcgcccgctctgaagaaagctgacataggtatttccatgggcaagctcggcaccgacgttgccaaggaggcagcggacatgatcttgacagatgacgatttctcgaccatcttgcaggcaatcgaacagggcaagggtatcttctataacatccagaacttcattacgttccagcttagtaccagcgtggctgcactcagtcttgtactgctgagcaccactcttggcttcaagaatccgctgaatgctatgcagatattgtggatcagtgagtattcctgcatccgattctatcccttgtatttcactaacaactattacagatattcttatggatggcccacccgcccagtctctaggcgtcgagcccgtcgaccctagcatcatgaatcgcccgccacgacccaagacagcccgtgttctgaccaaacctctaatccagcgcgtcctcacctcggccatggtcatcatggttggcacgttgtcaatctacatccaagaaatgggcgatatcaccgacggcagcccggtcgaaaagcgctcccgcgtcgtcaccgcgcacgacaccaccatgacatttacctgcttcgttttatttgacatgttcaacgcattgacatgccgcagcgaaggcaagtctgtcctacgtggtgaaatgccgctatttgggaacaagatgttcaattacgctgttcttggctcgttggccggccaggcctgcgtgatctacctgccgttcctgcagcgcatattccagaccgaggctctcgccttcgggtccttggtcaagctggtctgcattgccagttcggtgttctgggtggatgaaggccgcaaatatctgcatgcgatccgtcgtcggcgtggggtgggttctggttatagcgtcaatgtctgatctactgagacaacgggtgtacggttcggatttcctgttacgattttagaggtgtccatgccataacgtgtagtttatcatatttggattgatatcccccatatacataatagaaatgtcggctgtcgtcatatatgttatgccttcggacccataactatatactccgtatagcacaacgttatggctactctgtactcatctcccactaacccgaattctacaaatttcgatagacgcatgttaatagaataccatttcattcccttgattccttgttgacttgaaatttccaaattcatagatacattgctcaaaaattcccacatttctcgaccgacgagacccagttccccctcttagagaattgcaatcctaaacgaagcctcaatatcactggcgagcacgatactgagtgtcatccgcagccatcattcccagataccataagccaagcgcaaccgtgagcttcggttttttggatgtgccagtctgggtccagggtatcggagcacccagcttcaagttcccatcgccattgactcgttgaattggaaccagctcttggtcggtaagaatgaagccgaaccgcgtgccatactgcgtcatgtaccagttcacttgtgctaaaggtttgcgaaattcgtccctcgcacgagaagtgtctctcatgctgtgtgaccatttccatgagggcttcaggtctcctggaaggcgatttggacttaagatgtttcgattgccagcttcgccagcttcatagatcgaaagatccgggatgaattgattcagcgtaatagcatcagagcctaccccaatcaagacattggtgcgttcggaaatcgcgtcaaggactcgatcgagagcttgattgagaagatcttcctggggctcatcctgggactcatcctgggactcatcctgggactcatcctggggcttggagcctgaggctcagcctggggatcaacttggggctcagcacgttgcacggcacggttatcgagatgctcaaaggtacaccgcagggaccgccgaatcagagcgtgaatgtattccccaaatgcgagatgcaggccactttcagaggtaagctcgcgctgtgggctagtggatcgaataggatcatgctgaatgcgaattgccctgagcagcgggccaaatgagtgcatgatgtcgtctatattgaactccgtccagacaccaacaacattgatcttgttcggatcatacgatccattgttgtgctttgcttcgattgtccgacattgcgaacttgaatgcttggtggtgcttgtagcaaataagcgagtagagtaacttggtttgccatcttgaacagaataaaaaggttgagagatgataagtcttgggaaatgatagttatcaggaaatgaggattgttaggagatgataattcagaactgactcctgtgaataggtgttttatatatttgagatgggaaggatgaaaggcataatctattagcatctccttcctattcgaggtcaaccgaaagcccacgtccccgaagcgccatgacaaccaacagcgggaactgacagaggtaatcattggcaatgctcactcgaatcaaagcgctaagtgtgactgaaacgtatacctgcagcgggggccgtcaccgggtacatatgcatacaagccacaagaagatcactgacctcgaataggaaggagataccaatagtagtaataggtcatcataagaaaatcattaactatgctcactcaaagcgaagcgctaaggcgtatccttgcaccggtagctttgggatcagaccacaggcccctctaggtctaacagatattactttggtctatgtcatggcctagtggtaatatgtgatatccgctcgaaattgtaagtcgttttcacctgtcaccaagaagggaaagaatttcaaagaaaaaaaagtgaaagaatatgcgagaagacgtctaaaaaaagactatcacaaagacatcacagagcatgagcccactatgtattctctagggctgtaaatcacaacatcgaaagccaaacgccgtgacctacatagaagctctttgacttgtctttgacttgtcaagccacacttgtaaatgattggctttgttatcacaactcactcaacgtgaaacgctgtgatcaagacacatgcaggtgccttggaagggatgtacttttgtatagtcatattctgccatataatgtcgccttcgcccttctatcccttcctttttctccctccctattccacttatctttaagacctatcgcgctggaaccaagatgccatcatcattttgggagcactatagtcagccagcgaagaatattcctccacccgaggtttttgatacacccgatgttgatcttgccaatatgaaattctatgatacaaccaatatcgatatcgccgatgtggaattcgttgagatcattaaacagacggatcgttcgtttctgtgcagagcccgctggcaagacaaagactgcgtgcttaaggtggtaagcgaggaagtcatatagcgcgccttcaaatttaacatctaataggtttactagttcgctccttataaaccggaaaaatgggacccaccctcccgttctattgatcttttcaaaaatgagagtcgcgcatacagtcgattgaaggccggaggcttttgtgaacgaggatcggtacctgacttctatggggtagttgagaatattgaccctgaggcgaagggctggcaaccacagctcaagaaattctacgacgaaacttttccgaagggtctagatccagaggctcgcccaaatggtgtcctaatcgaatatatcccaatctaaatatgatcgatatctctaactacacagagcaaagagctcagaaacttaagcagctcctggccgacattcataaggctgggattgtacaccttgatatctatccccgaaatatgttaattcagggtgattctgatcgggtactctggatcgacttcgaactttcccagatatatgatacagagcactcagagcatcccagattttttgcccacgaaagggaaaatatggattacttcatagaagatctggtaattttatcactcctagtttgattataactttatagctgacttgcaattctagggcacagatcataagttgggggaatacaaagaaacgcggaataagtatttcgagtgactcttcgcggaattttgatgccatttccagatgttgtgctgatacccaattgcatatctccgagatacctttttgatcattctccaattacttatcatggcttaatactgttgaatgccttgtttgtcctatttgataggcctcatccagctagacgagcaggaatccttctcttttcttctccgctctccgagcaactccgcaaaacatgattttaatgagcagtaaaagaaaaaggtatgcccaaggagaaaagaaaatatccttcggtgtatattgtattgagcaaaaatactgaccgacgcagggatcgaacctgcaatctcttgattcgtagtcaagcgccttgccattgggccagccggccccctaataaagtaaaggtattagtcccttgatatcaaaataaccaaatcaattaatgatagtatgaattatcagaatcactcccttccaaatcaaccaatttagggtcaggaacaatagtagcattagtagtagtggcactaagagagatatctattacgtcagatctaccaccagagttactagttttactattttaactataggatataaagacgagatagaacttaatatttttaatactttattaggtaaaaagactatatatattctttagtatattctatatcgattataactataaagagatagcttttaataacgataaatagcgctagatcgactaacgtattcggtaagtgagctgcgcgcgcaaccgagctgcgcagcccaaaacacatagtaaatacgatatattacaacttgatatctcaacaacagtggctcatagggacttgtctttatagcatagtactatatatatgatatctagtatatctagggaactttaggaaaataaatggctttataactacgatatatatatttctagcttttagggacgtaattttcggtaatatttgaaatcatggtaagatagtattctactctctttgaaattgatatatagtactaagaagtcttatcaataactatcgacaaacggggagataggatgaacatatggttgttaagatataaatgtggaatatcttgcatttactatgtgttttgggctgcgcagctcggttgcgcgcgcagctcgcttaccgaatacgttagttaactaactaactagctcgatcgatgatctatgaccaaagtcaagcaaaacacctatgactgcaacctcctatgccgatgtgaaattgcaatggtgtacttggtgaatattccagcccctgtccaggctcaactgcccccgatgcgttagtgtcgcagtgcttggccatatcaatgtcatatttgtgaagccaggttgaactgagccatggcctttgaatataggaaagctattattgaggaagatagtcttagggggagacattttctgactgaatgcgatatatctgggactttgattttgcgaccttggtgagttgtaatcaaatttcttcgtgatgagataaatatgtggatatgtctcgagtgcacttaaatactaaactatattgggtgaagttatgtgcatggcaatagctttgaggtagagcaagttcattaattctagattttatacaatgaatttctttatgctcacaaatgaaacaaagccgcctcatctacgcctcatctacgtttcattaagtttagtctcagtaactggttttcggttctcgtccacagcgaagatttgcatggactcaattactcatttggtgcaggacagataggtagaatggtgcaataatacggagtagtcatggacctaatggagagtgtgactattgagatcagtagaatgatgttccgccagaatatcaagtggtatacatgtagtttgacagccgggatagacccggggtgacagaagctcgggtgattacactatgtcatgcttagggtgtcactaagctacatctgacacagctccagataccagcacctgcttgtgtcatctaccacactaaaaaggcaaccgccactgcagcccagtgacatttacttcctgccccctattggcgcctaagacaatgtattactagcattgcttccttaactgttacaaaatgtaataaaaaccattcagtataagacacagtatcaaagtccagcaatcgcctcctgccaccgactaggcataacagactagtgatctcgacggcctaaggcctccggatagtcattgcggagtgaagtgactgattccaatttccgaggccacatagtaattagagtatagggggagaggggtaccataggccacgcagtaaacaactctcctccatacattatttatttattttcttcttcccagctcgataaccgcacggcgtctagaaccgtcagaacgctctctttctttggaatctcgataagattgatactgattggtctctcgattgctagcgcgggagcgaatagctccaaaggacgcgagtagccatatctaactatcatgtgctaaccagaattggaaatactaggtatgggatttattcgagggaagacacctcttctacggaaatgacccagatggcaaagggtattcgacccgggcgcaccttgcagaagtcatgggcgttctgggaccacctcctttagatatgctgcaacgtggaaaacgaagtcatgaattctttactgaagatggtaagcatccctttcctgctcgacactttgcaaaggcttgggaagaccacgttgcagggaagtggaagcaagatatagagattccaataggaaccagtttggagatatcggagcagttcctcgagggaagaaataaggagatgtttctagcgtttatgagaggcatgcttcagtggagacctgaagataggaagacggcgaacgatctgctccaggatccgtggctgaatgatcagataggatgaagctgtgtgtctgattgccctgtcatagaatgaaaacacgcttccttcgaggagattaatcgcgccgagcactagccgtcttaccgccccataccctttctaggtatacgggtgagacggctatgtgacaatctccaggggctgaggttccaagtgtaggccggatacccgctgtagcgaaatgtcacctcactgccaactgcccccgtggcttaactgctcgtccggtgatgtcggtctgacttcgtgttgcagtagcatctcttctccacctcacgttgtaatttcatgatgtcttcgaaatattgcttgatagccttctttttcagagccacatgattgtattaggagatcgttattcagagacagcagatagcaagttggttaaagggttaggggtacggagcaccccgtatagtgctgtacctagtcacatgattgagggttcgtcgaagttcgaaccttacctacaacatagttagttcaagttcctactccttactccatactccatggtgtattgaatatactgctagtggtctgaagcattaaaatcttaccgatgcacatacctagtattttgaacaccattcgtaactactccataggatctgtatcttgattcaatccatgtcacacgtgccaggcacaatttgaaaatagaaaatagaaaagtagaattgttctcggcccagataggaaaccccgataggaggctgaatgaagacccagtcccgcgggagtggatctgacagtgcagaaaaaaaaaagataaggaacagtgtaaccttgtaattgttcaggtacaatttacatttgaagattaagatcaacacgtaaatatgacctcgatcccctattgaatatctgctcagatatattcccctattcgtagtaaactgtaggtaccgtagatagggccaatactccggcatcggtagtaagccggaacacggcgacagtcaagtcaggaagatccccggaggcatcggggaaacacggaaagcgtaaacgggaccttatctgtcgccaatcgttggctcgttcccatttcgatacgctaacccgcaaagggaaaggcttagcttacggcggagccccacttagcgccagtggcgagttggactttatctgtagccaatcagcgggccgggaatcgatcttcacctatccaattgccggtgggcgataggcatttgggggcatttgggggttctgatatcccgagaacagagaaatccaagataagcgcctgtttcttcgccgaaggtctccagaagccgaagtgcaacggtgttgagtacgcgcaagggtacctgcaggagatgataagctatctggcagtttacttgtatctagttggctatctgatttagaggttctgagtctgaaaaagatatataaagagtcgtccgcatggaatctagttccccgaaactttaggaactattccccggagtcgaactactgcatggtcccattggatcataatgtattgtccaaggtatatccctcacgggccaaagctcgaactattggcaaggcacgatccatactcccttgccacacgatgcggctgtccacgccggggatgacgaggttcctaggtgttctactggttatattgtgtcgttatactatgtgttaattattgtatacagaaatcaaatgaactgagctttgttatgtataccagaccctgacggaacattgaaacgttgaaacacgacagtatctatcgattatcccattgctattgtcacaatctctgaccacaccactgcgaaccatattttgcccagctctcgtccgattttctcctctttaccgcgccttcccacggcaataattgaagtgtttcatgattctattttagctttgttctctattcacttttatcgcgtggaatcgaattgaattgccaattgccgttattcgacggggacccactcgtgtcgatctgacttatcttgggattttgggatttttggttcgacgagttcgggtttccttatttttatatccgtggcgaaattcttctctttttaacttctggaacatccgtctttttcttcctttcgccttcacttcctactttcaccctctctcctacacctaccccatccacatccaaagcttcgagcttctgctacaatggcgttcaacgggaaagccccgtacgccccggactatgcctcctacaactggataggcgccccctccaattacgacctctcgaccaacacagacttgggcggcgattcccgtatgcgtctttcttgtctccaaacggtgtgatggttttaacatgggtcccaactaggcaccgaaaatgtcaacaaatggttccaggccggcgaccaggcctacatcctcgtggcctcggccatggtcatggtcatgatccctggtctcggctttttatactcgggattggctcgtcgaaagtctgccctgagtatgatctgggcttgtatggcttcgttctcgatcgtgaccttccaatggtatttctggggttattcgcttgctttctccccgacggcgaccaacggttatatcggcaacctgcgaaacttcggtttaatgaagacattggctgatcccagtcctggttctccactggttccaaacttgctctatgcgttctatcaggtaagatcgaacatagaaccatgaatctggtttttgtttccagccgatgctgatatctactagatgcaattctgcggtgtcactgcagctatcgtcatgggagcggtcgctgaacgcggtcgccttcttcctgccatggtcttcgtcttcatctgggcgactatcgtttactgtccgctagcctgctgggtctggaacgtcaacggctgggcgtacaagtacggcgtgatggattacgccggtggtggtcccgtcgaaatcggttccggtttcacagctctggcctactcgatggtcctcggtcgccgacaggaacgcatgatgctcaacttccgcccacacaacgtctccctcatcctcctcggcacggttttcctctggttcggctggctcgggttcaacggtggatccgcctttggagctaacatgcgcgctaccatggcctcctggaacactaacctgactgccgccttcggtgccatcacttgggttctgctcgattggcgtctggctcgcaagtggtcaatggtcggctggtgctccggtaccatctcgggactcgtagctgcgacacccgcctccggattcatctcgccctgggctagcgtcatcctcggcattgtcaccggcatcgtgtgcaattactccaccaagatcaagtactggatccgaatcgacgactctatggatgtgttggccgagcacggcatcgcaggaatcgtcggcctgatcttcaacgccttgttcggtgacgacgccatcgccggtctggacggtgtcagtaccggcactggcgtcggcggctgggtcatccacaactacaagcagctgtacatccagatcgcctacatcgtcgcgaccgcctcgtactccttcgtcatgtccacgatcatcgcctacgccatcaacgctgtcccgggcctgaacctgcgcgcctccgaggaagccgagcttctcggcatggacgacgaccagctgggcgagtttgcctacgactacgtcgaggtccgccgcgactacctcgcctggaccccgcagaaccacgaccagctcgccgacggccacgaggtccctgccgcgcagcgctacggcatcggcgaacacagcgagatgatgctcggtagctcgccgcgcgaggtgatgctcgagggccactcgcctaacgggcagagcagccgcggcggcagcgaaggcgacgtcggcatgcacgaaatcaagatcgcgcctgctcctcgccaggccgccgagcagaatcagaatcagaatcattccgatgcacagggtgaacctgttgtgctaaagccggtgcaagagaagacggagaactaatcagtcttacatttcacttcattctcctttctcccccttcgctttgcccaactcattcatcgtctcttctctcaatctcttttgcatgacatgcatttcgcatacgccatttttcgtttagaaagctttgattttcttcgcattttcgcttctttatctcgatatcccttgagcgtgcttcttttcttgcaaccaaaaagcctggggctttttataccatctcaaacctaccctcgattctctcaatcccgcgaatttccaccgactccacataccatccgacatttctcaccctccgttcttcccatctccacctcaaccctcaaccctctcccgctaccaaatcacatacctcaccaccttttcaatccaaatacaaccttcctgggaaaagcaacttgaattatggtctaatttggcctggcgctccattgttctaagctttttttttttatggcaatgggggatattaaactgggttctgtacggtatacaaactgcttcgttgaatgacaagggaaataataccttgctttctgtccatgttttctggtcttgcccctggaatagagcgagatagcccgatttacatttttattatctaagacttttattcacgacgtttgtataattgtagatagatggtagcttgtaaatattactaccttgcctgttactagtctaaatgcaactgtctaactagaacccgacataactaacacaaaaaataaagaattcaaaatgaaccaacgcaaaaaatgcaattatacaaaacctcttataaacaattaaagaccttcctctccctacctcctaaccatccccctaaccctaatcaaatcctccctcccaagcttctcaacaacctccgccgcaaccccacccctcctcacctcatcccactcatcctcatccatgcccataacaagcgtcatctgcacacagcgcgcaaagcactcgcgataccgatacctccccggcgcaccagccacatacccaacctcaaccgcggcgcccacaagccccgcaacatccctctcgagacgcgccgcgccgagcgcgttaatccgcgatccgtacgaccagagcctcttctccaggagccgggccaggtacgcgagcgtcacgccgaggacgcggtcgaaggcggagggcgtgaggatgcgcgcgaagggcgtgaggaggtcgttccaggcggcggtgaagcgcggcttgacgagttctttgtcgaagggggagtttgggttgtcgggttcgaggttcgggtttggtgtgtattcgatgtcgcggaaggagtctgcgaggattggacgcagccgcggtttgattgcgttgttgaagattacttggattccgtcggttaggaggtctgttactttgctttcgaaggttgttgatagggtttggagggtttggtggactttttgggcggtgcttgggctggggaagattgagaggaggtgcggggttgcttgtgtggtggtggtgtcggtgtcggttggtttggagcctgtgttgttttgcacgattcggcggatgtagtctactcctaggtcgaggttgttcatttgcactaggaaggagatgatggtttgttcggagggtggtccgccttggactgggatacgtgggtagcactcgtcgcgcatcttgcgctgggtcatgccgatgaaatcggaccctaggacgcgtgagagtgtcgggactacgtttgtcacgactgcttcttgggaggtggcgagcgactgctggatgaccttgttgacaatgtacattatgtcgtcgatggctgaggtgatgtgcggtggatccgctttcagtggacgctgggggttcatcgtgaggcctgatggggactcgtctagctggaaggccttttccacagagcggcggaagaagaaggttgtcattgtgttgaagggggccactaggcggtcatggatcttttgggccagaggtgactctcgcaagaaggtgggaagctcaaatcgcttatcgtcatctggctcatcctccgaagactaaagaagttgttagtgctgatattgaaggggcggagatgtactcacattacatgtatcagccaggaaccgacagtacagtgaccaccgacccaacatgatagccatttcattcaacaccccatcgatctctttcatatccaccccctcctcgtcggcggctgtgctcgcccccatggcaggggattgtgggcgaggcgggcctgttcgctgcgcggacaggaagctctgcaccaagaaagtgaaggcataggatttgatatccatcaattttcgatccacatggcgctcatcgctccatgtatcaagaatgataccaccctgtacatctgcctcgacctgtagccgttcaatgacgcgtcccatcttacgggggccatagtggtgctccacgagcccgccgtggccatcaataatctgcgcaatatgttcaaacagtttggtaagcgcatttgcatagaagaacccgtccttattttgagcattcccggtagccccattgaggttcgcccgagccttggccgcgacaccctggcacacataacgaccataaacatcgagaccaacctcagagcggccaataagcgggaaaagcttgaagaagcgtgtaatcttggctccatcattctccttaaccgccttctcaaactctcgcaggaacagcccgcacaacgactccgccgcgttatccagcgtcacacttggagggtccggtacctcagccgtagggaccatctccgcagaaaacgcgccattaacaaccgtcgccgggatctgagccgcgcggtgtaggtagctggcggctttctcccagtcctggggcgcacccatcgagcccgccacgcccagcgtacacgccttgagttcggccacctgctcgacaacttccaaggtggctttcacccgagcctgctcgagatctagccggcggaccgcactggagatccggtctgcggtgccggcggcttcggagagcatcccatggctgatggagcgggttgtgctggcgtgggtcccgatgttgacgcgcatcaaatccagccggcccagctcacgggagaggtctttctgggatgttactagggcatccaggcgggcagtcacagacgcttcttgggtatgcaggtgggacaacgtggctttgatctcagcgacggagctggcgttgaagatgtcgggctgtgggggaggagatgtctctgttggtgaggcattggtatttggagggcttttgggcatggaattatgcccattggcagttgcagccattctgggcgccattggtcgtcgcaagttggtttgttgatgccacgccagttgtagggggttgcgggcggtgagggcgggttttacagcctcatgattcatgttactgtgctacgtcaagaccggcggggatttatgactccagattgttaaaccaaatagaacttccatacttgcctgaacccctctttctttgtacttcagtcgccgtttcatctgcggcgtcttaatgtggttgtgattcaacgcgacgtcatttccgccccacgctcgcgattatatcagttgctcttttccagtttcctttcctttttttctgtgtaccttctctgttgatcttcttcttattgacaagtctcttggcttgacttacgtctgtcaagtcttcaaccgccatcatcggacgtcccaaacctagacgtcggaatcggcgcaccatgggcaacgaatcgtcaacccaggtggatgagtttgcacgccccttggtgcttgaggggcggaatattgaggcggtcgccaaatatgttaaacagcagaatgtaaagaaagttgtggtgatggtatgcagcgtgaaccccatagaatactgcatgagagctaacaagcatgcaggtgggagcgggtatcagcacttcagcaggcatcccagactttcgctcacctgacacgggaatctacgccaatctggcaaatctagatctaccagagcccgaggcagtctttgatattggtttcttccggcgtaaccccaaacctttctatgcattggcgcacgagctgtacccgggacgctatcgtccgactgtcgtgcactcattcatcaaactactttacgacaaagggattctcctgaaacattttactcaaaacattgactgcctcgagcgcgaggcgggcgtgccaggcgacaagattatcgaggcccatggcagttttgcatcacagcgctgcattgaatgcaaggagacgttcccagacgaggagatgcaccagatggtggccaagagcaatgtaccccactgccacaagtgcaacggtctggtcaagccggacattgtgttcttcggcgaatctctgccttcggaattctttgaaagccgttctctgccagaagaggccgatctctgcattgtcatgggaactagtctgtctgtccagccatttgccagtctgccttcgatggttagtccaggcgtgcctcgcgtgctcatcaatatggagcgtgtcggtggccttggctcgcggagtgacgatgtgttggtgattggggactgtgatgccggagtgcgcaagtttgcaaaggctctgggatgggcagaggaattggaggcgctgtgggaggaaaccaacccagatccgcagaagagggcggaggagaatgctccgctgcagacccgagacgagcggctgcaggaggaggtggaccgactcacggaggaggttgatcgaactctggggttgacagatgcgtatcggaatagagtacgcgagaagctggagtcacacgacaaggacaaggcacaccgccagtctggaggtctggaccatgttttcccgcatttggcgcgtaagctgtcacattgagattatgattcatgaaatgtctttgataggcagaaataggagattatcatttgagtattatggggtagatctagtgcagtacgtactccgtagttatgtaggacatacggggtagttatgtcgtacataacatggatagccaacgccaagagatgataatatcatcatacgtttgcggtcgagacttgatttcggtcaaataacctggaatgttctaataatctctttatatcagattaacctattttaactatagcctaagatagatctgctataaaagcaattcccccctttgccctaacttcccccaattgattttctcgtttctctccgacagtccaaaacaagacatctacagttgccccacgttatttttccatatcgtcattcttccccctccccaacttttttctttctttcatttctcttcctccataaattcatattcatattcatcatggttggacttggcccaaagcacccgccgtcccgcaagggtgaggcttgaagagctacccctgcctattttaaactaaccatgtggtacagggtccatgcacgagctgccccagaacttgctgggcaccattcaggacctcgagaaggctttcactgtggatcgcacgaagctgaaggaggtcgtggcacacttcgccaaagagctcgagaaaggtgagcccatgatccgctccctgattctgcgcagtcgctaacaggaaaaaaattaggcctgaccgtcgagggcggcaacattgtgagaacgacatcattcccgatcccaatttagactgaccctagctaatagcccatgaatgtcacctgggtcttggacttccccgatggcaacgagcgaggaacctacctggccctcgatatgggcggcaccaacctacgtgtttgcgaaattaccttgaccgaggagaagggcgctttcgatatcacacaatccaaatataagatgcccgaggagctgcgcactggaaccgccgatgagttgtgggagtacatcgccgactgcttgcagcagttcatcgagtaccaccacgaggaaggaaacctcgccaagctgcctctcggtttcactttctcctaccccgcgacccaggagtacatcgatcacggtgttctgcagcgctggaccaagggcttcgatatcgacggtgtcgagggtcatgatgttgttccccctctggaggagatcttgaagaagcgtgtatgttcatgagatgacgataccctccccctccccacgcaggttcaaagactcacaaggctacagggtcttcccatcaaagtcgcagcactgattaacgataccaccggtaccctcattgcttcctcctataccgactccgccatgaggattggctgcatcttcggtaccggcgtgaacgccgcatacatggagaacgcagggtctattcccaagctcgcctacttgaacctacccgccgacatgcccgtcgccatcaactgcgaatacggagccttcgacaatgagcacgtggtcctccccctcactaaatatgatgacatcatcgatcgcgattctccccgccccggccagcaagccttcgagaagatgaccgctggtctgtacctcggcgagatcttccgtctcgtcctaattgacctggtcgacaaccaccccggtctgattttcaacggccaggacgtctccaagctacgcaagccctacctgctcgatgcctccttcctcgcccacatcgaagaggatccctacgagaacctgacggagaccttggatctcttcgaactcacgctgaacatccgccctaccgagccggagctggagctaattcgccgtctcgccgagctgatcggtacccgtgctgctcgtctttccgcctgcggagtcgccgccatttgcactaagaagaagatcgactcctgccacgtcggtgctgacggctccgtcttcaccaagtacccccacttccaggcgcgcggtgcccaggccctgcgtgagatcctcgactgggcccccaacgagaaggacaaggtcgtcatcatggctgccgaggatggttccggtgttggtgctgccctgattgccgctctgacactcaagcgtatcaaggctggcaacctcgttggtgtccgcaacatggatgacatgaagaccctgctttgagtgggtggtcttgtaatgatggtgactatgactatcatttaacccatgacaaaacaaaccctacgtaccgattttggatatcttcttggagttggtttgtgccatttagttcgggggttttatgaaagatttaacgatatatcgattctgtgtatgttagccttagatggctcgtgaatagaacatacatagtgctattattctcgtaactatcactgtagctagtatcattgtaattctcggcttctctactcagcttcacatctcacccaagtcactaacccgaggaacagcaaggcgtagatatcaaagaagatacaatgttcagatataatcaattggcgtataaacactagaacacgacctacctacatacaagtctcacctacataacaatcgagcccatctagagccacacacctaaacccccgaatcatcctgctcaatatcaaaagcctcatcataagcattccaagaagcacaattatcctcaagagcccggcgatcaatcaacggctcaatctcactctccctctccaaaaactgcaacgcaaagccctcatccgtatgccagccaatatgacaatgcataagccacgccccggggttatccgtctcaaacgccataagcaaatacccattcccattcagcatcgccgtatctctccggggcgggttattagtcgccacactcccatcccacggattcgacccctgcgccagaacaaagaaatcatgtccgtgcatatggatcgggtgcgtgaccgggaaactagtattgatcatgaggtacacccactcgttcgcccgcggcagctcaatcacgccactcgactcggtgaagttgggcgtgttctcgttgttgaaaagctgcagtaaggttgggtcttcccagaggacttgcatcgtcgtgctgttgagataccagcggaagaggttcgcggtgttgcgtcccagtgtcacgtctgttaggttgttccagtctgcggctgagacggtcttggggacttgtgggattaggctggaggctggctcgtcggtgcattcgtcggggaacgtgtacggtcttgtggtgggtgtgtttggactgttgccgtagtagaggatgcctcttatgttgtctgggtttgcgttttcggagcatgcttcttgggggattgcgcggatccagaatgagtcggagatttggcgtttgttggctgttacaattacatcgtagcgttggcctgtgtgtttttttgttagttcatgtttcttttcatttggagggatggagctggggcttgcacatacccattccgatattgatatagtccgtcgtaaacggcttgatcggcacaaagtccgccgcaataacagtaagcgtatggttatcaatcataaacttccagtgcgtatcaacagccgaattaacaatcctcagccggtacgaagacccctggttgaccttcatctggaatcgcgtgcccgtagaattggtcccattaccaaagacattcgtcccgttaatcaagccagtatccaaagtcggtggccctatcgtctgagcctccaagtatagctcatcaacagtagggtgcgaccagtccgtcaggaacagactgcccttatcgacctggtagttcgccgtagcagggccattgatcacaatcccgccaaacacgccctcccacgcctgcaggccaatgtgcgaatggtaccacgatgagccgtactgcgtggcgcgccatttatatgttatggttgagcctggcgcggtgggacattgcgtgatggagaccacaccgtcgttgccgttcgtgtagttctgtctgatcccgtgccagtggatgctcgtgccgttcttggcattgtgtaggctgttcgtgacgtggatcacgacctcatcgccccagtctgcgaagatcgttgggcccgggatagtcccgttcacggccattaccggccggctgaacccgtctggtgctgctactagctcttcgacgttgagccagtactcccgggttacgccggtgttgggtactatctgggtgtagtcggtgttgatgtcgtattggcaccatctggaccgtgttaggggcgtgttgcccacacagggtgttcctgttggcttggtgatcttggtggttgtcgtgggtctgtggttttgtagctggacattcacagagctagctgcgttctgtggaatggccacgacagaagcgctcaggctgaatgccaggaggagaaaagcttggaggttcatagctgctgattttacccacgtagggcacttatataatgctcaattgtctttgggtcacgaatacagctctatatagagcttgcaacacacccaaaaaagacttcgagtagaagaaaatgaatgggacttgctgatacacaaccaagagaatgatctcctatttaagccgctatcttagaagtatatcacactacgaggttgttagactaagaccgaaaattccatgtctcttttcacgaggtgacctgcatactcctcactaggatatgccaggcagccctaccggcggcgatgccgtgtaaatggatcttgtgatacacaagacgacccgacagacgaataccggcgaagcatcagagtcatagtccagctcggaagttgaggctatgtgctcagtggatacctgaatagcaagagaaaggcgccccgtatccacgccaaagacagtccaccattcaaacgtaagaagatgttcaactcggggaccttcccagattctgagtgtctatcacaccacgtgcgcactggccgctttgatattgggggtgtttgatagtgccctttctctcgtaatagtacccttgagatgatggatatcccatgtaactagggctgtgtcttagattaacaaagtcaaatcttgcaaagagaaccaatgatggaggtcggtcatcgatgatattattctctagttcgatcgcagtcagattggcatgcagggccttgcattagggttatgctccccgacacgcggtcctgtttgatcccggtgtaacctgtttcagccttagtctatacgagtgtaagcatcccacgtgtgtggcttggacattaatgttgtgatctcgcatattggatgtttctttttttgagatatcagctggtttgtccaggattgtcgattgttgcgagaatcttgacgcagaatgcatgcgagtggatcgtcgatctggttgtaacagtcgggatctgaattttagcatggaacgcagcctgatgatggcaatgggggtgtttctggtttactgggatcctgcgatagagttgcaaattacgtatcgtcagctcataccggttcaaatcacaataggaggcttggatcacactctttgaaaatagagagaagatcagcggttgagactatagagatcattggttagttcctagggtgctgcctgcttctaatcacattgttgtctcgttgaatatgccctcctgaatctgtcctgttttataagttttgcttgatcctgacacccttccaacatattgtatgacttgttcattgcaagatgctatttctttctattcttccccttctagcctttgggctagtctgctttgcgcatccacttgaaaagcgacagtcaacctcaaccgattccttcaagctgtatgcctatggcactggcattagcggactgcccgtcttctacaggaatggtatctcagccctcccagctctcaagaaaagcagtattgactgatacatatcaccttgaccacaggtactgcccaagttgcagatgcgtccaaagtagacacaaccacaatggccgcaatgaccccaatcaactgtaagaacccaagatctccacttgataccatgtgagaaccactggaattacatctaaccacgtacacgtaacagtcaccgccgccactgacaacacctgggttgcacaccccacttccagctccagtgccacggcggacttcaccaccctctctaccgataccaacatgctgtgtctagaccaaggcgatacagcggactccaacccagttggatttaccggtgcatccgcggcggaccagtcgaccacaaccaagctcagtaacgtgtggtccacgtacgggggctacgttctagtcaccgtgagcggggccaacttctacgcgagacaggctgacacagacggcgtgtactctctgctttggagtagctcggctgaggcgatgactgatactataccgcttgtgctgcggactactgagcccgcgacggtatctgtattgacttagctgagcagggttgggtaggggtttggtggagttgaggggtctcgttacatagcagcaagcggtatggtgtgtggtgttgtaaggaatcgatctcggctctgcctactcggggactttgttggatacgatgttatgcagctagtaatgtgctattgtgtatcatctatttgtgttgtgttggctgcattgtgagggaggaagggggttagctagcgcttactatattatgtatggcatataggctgcattcggttccggaacatgagagtcccgtattctgtaaagtatccgatatatcaagtgtacgatcaagtgtacgggcgactaacaagtacgtagatctaatgatagagttagttatgaatcggtggcatagttagtcggctgcacaaatggagatatataactatcccgggatgtgtggtcagagcatgccagtcttgaaatcgaaaaacaatgagagccgaatgaattgacctctacagacaagtaaaactagcaaacataccaaaaaacatagattcaggaaattgctacataacctatagctgatatatgcatgagggaacgacgcggattgtctcagacaaacgagaggaatactatacgagacttattgcagaaaacgcctcgttgctgtgcgcagccaagggagagagaaagcccaacagaggattatcaagcaaagtgttggttgtgaagaggccccggcattaaaacaaagaatccagagggaataaaatggaataaagaaaaaaccctcgggggcaaagttgaaatcagacctagaaaagcaaggtaaggcagactggcaaataaaaagaacccgatgcaagcgacatttgatatcaaaagcccaaaaacaaaactccccagttctcctagacccagaaaacaccagaaataaaatgaaaacgtggtttagaaagaaaaaacaccggattcccatcccaaacccttggtaaattgacatcccgaataacaaagaaaaaaaaaagcagaacccattctacatctgccatctgtaccaaaccttctgcgagactaaacccttgttgatcgtttccgcagaccaaattcttgttcctggagctctcgtatcaaacgaagactttcttcgtctgcatcctcgtctccagtgatatgctgagtatgcctgtgctgacgcggagagagtgacgtagggccttgacgatggaagtgcttttcatacatcggagagctcttcttcgcgtgtgaagaagagggacgtgatgaaggctttcttgtcgacgctggaacaggagtggtcttgcgggccccgatggtcgaagacgtggctcgtgctgcttgtttcggagcccgggctgtatttgcatcgggcgcgaaccgatcgacgtgtcgaggttggcgagacgagtgtcgagagctagagttgggtgtgtggagagcagttgacacttccccttcaacagactgcacggcatctccctcttgaaccccatccatctcgtcgaccagcgacgtgggcggtgacaccaaagaggtgtttggcttggatgaagacacagacatagaatttaagtcctttgcttccacaggctcggcctggaaagcaggtggtgatgcgtataaagcttgattttgaggtgcctcggccgccttaggcagatgcttatcaatttgattgaaaggctcgtggtcataggtatccatcaggtcgccttgcaccatcatttcgtctccatcatgatcaaagaatactgcaggctgtgtcatgggcgatgtgctctcctgcttcgcctttttggctgaggcgggcatgtcaccctcttcagcagggcgtgctcgtttggcggaagcattcgcacgaggtttagaacgctcttgggccttgatcggatctatccgaccgtactcatcgtggatgcaacggcgctagtattgggttagtaaaagataaaaggagtaaaagaagtatcaaggggtacgacaaaccttgctcttccgacaatcatcgcacgccttgctgcgtccctttttccctccgttggttccgtcggggctcacatcaatgagacgattggcggctatcgtggagttgcccatgaccgcggattggaatctggccgagctctcgaatcgttccaggtcaacaagatgcccattgttctgaaactccgtttgtgacgcaatcgctgccaaagaattcaaagcagatacagcatcctgggccaatgacgatggcgtgctcactccagagccggctgtgaatgtattggttgcgacttgcccgttgagcaccagatcaccgggttcatctttgtgtcggcatcgaatgcgtcgcttgcgacaggcgtcacatgcaactcgcttgggaccaagacctgaggctcgttgtacggctcggggcttgggtgtagcaatatctttaatgctcgtttccaaaacaacactgaatggcgccggcgttgcacttccatcagactgcgcataagcaaggctgctggctgggggattgggagttgcaggggcctcttctgaaggccactggacagcttgtctttcggcatatgtgcgttggttatcgacattgcgttcggatcggcggctgggtcgtcctgcgggcttcttgtctgcaatagaaaccttgggattgctttcgatgacgccgggtcgagtccagaggggtgccttttcgttaccacgtttccaggcgacccaaattccgaattttctgatcatatccacgggatctcccgtacctttggggatagagcgtttgaccgcgtttcgaatgtccacggagaggactccatcgacagtatagccacccgcaatgagtgcagtccgaagcaaatacttagttaactcaagtaagccctccagttccgcctgtgagtaaaaacgtgcattgtgatggggagaacctggaggttcctggttggcgcgttcgccaaactcgtaataaattgggtattgacggtggaaccgatagttctcatcctgcatgaatgcttccatcacattctgcgggacggggtcatcctccaggtatttttgagccgtataccactggatcttttggaagaaagggtaacggaacttcttgggaactttggtctctttctcgatgttgagaatcttgatttgcatcccgtagttcaacttggtcaagaagttgccgccaataaccaaactgttttccggggtccagactgcgtgaatccaaccggacgggatcaacatggtgtctccctcggagagatccacacggtagcactccttggtctggtttccaaggaaaatcgagtcctgggcaggagagttgcaccactcctcgtacttcttgaggtgtttgtctttgggaggaataaagaagaaagtcttcttgcccttcaggatatggtagtacactgaagatcccccaaagtcgatgtgaaagtcggtatagcaatcggcaacagacatcaggcagtagaactgaactttgggatattcgccaattgccttcagttcctctggccacacggcatcttgcagatccaagtcacgcacaaccttcggtcgccggataagtctgccaagtttgctctgcgatacctccagactgataacattcctgacaggcttgtccgactcattactttcgtaataatcggcccatttctgcatgttccacctcttgtcctctccttgctgagacttgacatcgatcacttcaaccctttcttcgggtccgtaaagctctgccacagcacggacagtgagacccttcggaatgaccatacctaagaggtcttgaccacaatcgactgtttcttcaatatgactcgcttgttctgggtggttctcgagaagatcatcaaacatctcttgagaacaagcctcttgtaccaaagactcgaactctggattctccgaggaaataggttcggaagagttccagcaggcaggtatcacaataggctccgtccacccgttacctcgctcgaagtattccgctgtgaccagctcaggtttcattcggggaaaattctcaggttgaaatcggatctttccttgccgaataggctcgagatagtgatgttccaacgagtcagtagcagctttgactagaccttgattcaggcctgcgtagtcaatagctgtccgggcccgcgaggacttgcgcacaaaagttgtttggccatgaactgatcgacaatgccgacaaataaacttgtcgactgtgcgaacctcacgatcattcttgaagccggcgcaaacgatgtggaaccagtgtttgcatccatcgcaactgatccacgtgtcttcgtcctgttcctcggtctcaactgggatgcgcactagatgacatgccccacatcttgcttgactggtatcaccctcttcctcttccacttttggtggaatggatagggtcttcggcgggaattgaggttcttgaagatcggccggaggatggatcccataaggagtagggtgaggcgtatcgattggggaatgccaggctttgccctcctgttcatcctcccagacaattggcggaaaattgccagagctagtggttgggcgaattccacggatcgcaggacgggatatgaaggctgacccgtcagaccgagagcgcatgcgggcatgaggaatatcctcagaattgtgatccatcttggaattgctctggtccacatgtccaacagcagcaaacccaactcgagattgacgaattgcgtcgcctgtgtagtggtggtaggtctcgtcgatgctgactcgtttagtgtggttgccggggcggaaattagtaggccgcgcgagattgagtaagagctctgcatcggttgtcatgctttccactccagctgaatgtgggttttctgccagcatccctagctgcgggtgatagggcgacggattcctcaccgaccgtgcccgcttcgccggtcgttcagactctgcggggtcgggtggaaataagggaatcgccgactgaagggttggggaaggcgggttgggagggagtgatgtgaaggtaggactcgtcgcgagggcgatcgtcgcaagtgtgtcgatagtcgagcttgagcggccatggcctgaccgctggtgtgaaacaccttctgcggcgacatgtcgatcgtgattagaagaaagctgatcgcgatcaagactggcagctcgagcagggccgcggctgccccaagaggagtgaaaatcggtcgttgtggatggagtgataggctcgacagcgcgtaaaggaggggacggagtacggtattgcggcgggcggccgccgctgggggttgcgggtgnnnnnnnnnnnnnnnnnnnnnnnnnnnnnnnnnnnnnnnnnnnnnnnnnnnnnnnnnnnnnnnnnnnnnnnnnnnnnnnnnnnnnnnnnnnnnnnnnnnnnnnnnnnnnnnnnnnnnnnnnnnnnnnnnnnnnnnnnnnnnnnnnnnnnnnnnnnnnnnnnnnnnnnnnnnnnnnnnnnnnnnnnnnnnnnnnnnnnnnnnggggggggggcggccgccgatgggattcgcgaatgatgccgcgctcatcattttcgcaacccggtgagagtgtagattaaagaaatttaaagatgaagggagtggtgaaaagatgcgctgcggtaggtgggtgcaaagcggggatactggaccacacgggctagcgagaggccggcgcaggcgaatggaatgtcattcctggcaggaaagcatgcgcaaaacggaccgcaagtatatgattgatgtttgatgaatgattgagggagaatcaggtggtcgacggtggtcgcggagcgttgagggggttcgaatcgagcggcgggaggacaaaggcgccgagagtcgcgccgcaacctgcgggcaggtagggaagggagtcgaatgaggtccagtggccaggaatcgtttcctgccaaccggatgggaagttataattatgcgaatggatgaagcgccgagagcgagagagaagcggatgagcgcgaggtgttgaggcaaaggaggaagcgggagtcgagcagtacttggaggtatgtatacggtacagctgcggtctcctacattacgttgtctcctgccatcacatttactagaaaagattgatcttgcatatatataatatcaagatcaagaaacgctcattacaacatgcgattgtgtctacttggttgattccccccgttgctcctttctctgtagtccaaatgaagttggcgacgccgagagcgtccgtcttgataatacagtttcataccatcacgataccgtcacgtggtaagtatgggtagatcaccgcactcattgcggtcacatgacccggtcacatacggttcaagaaccaactgccactagaccaggataagtaagcgcaccgccaagccaaacctcgtggttgtccttgcgacttgctcggatcttctgtctcttcgctattccaacactgcaactgataccttgcgtatcttcttgtcaacactttcattcgacatcttctaggactttctcgtctctgagaatgagccgaaagctcgcccccgaagccaatcggtacgtgagaattactttttccatgcccctcccggattctcagcacaagtgccatttcgccatcaacagcttgatcgttgggtcgagcagatccctgacatttggaagtgactcgcgctaacctcttttttctcttttttacaggattctcttcgtcaagaacctcaagtatgtacctgatcattccgctgcttggctccggctcgattctccggcagatcagccgtgcagctccccatttacaatcgcgatcagatcgctgacatctttctcaaaagctacaacgtaacggcagagcaacttttcgacctgtttggcaaatttggtcccattcggtaatgtcacccatggtcgcgtgcgtttgaacccgatctaataccatttcatctacagtcaaattcgtcagggtatcgccaataactccaagggaaccgcatttgttatctatgaagacgtccatgacgcaaagcaggcatgcgataaactaaatggcttcaatttccaaaacagatatttggttggtacgtgttgcatatggatctaatgagcgtccagaattattggaagatgactaactttggatgttatagtcctctatcaccagccagagaagatggtgcggacgaaagaggatattacggaaagacaagagaacttagagaggctgaaacaacaacatgggatagaatgatgtgacgaattctttttctcttccctctgcaagcatttagctgcgcgtggtattgccatgcctttactattcaatcgcggcttggttgaggggtttccggcgtttttattccctgggtttttttcttcttctttcagagggtttgatggtgggcgaggctggttctggtcgtcatatattgacccagatatgatcgtgcgaacagcacgccggcgagatctgatttcttcttatgtttattctattcaaccattactactattaccccctttgtcaattcgaccctccaatttgctccaccattgtctatgctatggctagatgctaggtgaaagggttttttgcgaatgctatattactggaagtgatgaattatacgagtgtagagctgttttcgagcttcgttggatctcagaatgtcaagctaagggtctgtctacctaagggtgccacatcactgctcagtacccactattctgcaggggtatttgaagcttggcatcgacttaagacatatacaaaccataccaagatcaagatcaaagcagatagcgaaataaagagatgccaagaccaaagacccttaaaatagccgtattgccatgcagaccctgaaagggaagtgctatcttgtcgatcccgcggggaccctgacaccgcctaggggcagtctcacttgaccctgatcctttttgttcttttccagaacctctttttttctacactcctcacaaagaactggtttttataagttcaggcttatttctactcatccgctgacccgatttattgccactcatttcgatgtcacgcatatgacgtccggctatctccgcctctgacaaaccttccaaggttactaagtgcttcctacgatctggtttccagcatatgtcgcgttccatctgaaatttctcactgttcttctggttttcccagactgaaaaaggatggacggtacgaccggctcgttggcttcgatagctacaaccacgcttattgctgctagctccctagccattccaaccccctcgggtgcacacacactatactatgatgcaacgaattcttcaagcccagggcaggatccaaatggcgaaggaggagaatgcaagctacttggtcccttctctgtgtttgttcagattgctcttggcagcctcgcattattatctctagtctataagagatggagagaacgaccgcagcgcccggtgaagatctgggcctttgacgtctcaaagcaagtcttcggatcggtgatgcttcacatgttgaatctggtcatgtcgttgttttcggcgggccaactggagattcgaagctcatacaagccgaacccatgctcattttacttactgaacctaggaatcgacgtgcgttccttctgatcttgttttgacttcttttgaggagctgctggctaactgatagacagactacactcggtatccccattctgatcctccttctccacgttctcaatcgtttggcatcctacacacctcttgcaaaccccccagaatctatagagtcaggaaattatggccagcctccacgcataacctggtggctcaaacaggccatcgtttacttcatgggattactcggcatgaagatatgcgtgttcttcctcatcgagctcttgcctttcatcgtcactatcggcgactgggctctaaggtggacagaaggccacgctgctgtccagatcttcttcgtcatgctgcttttcccagtcatcatgaacgccatacagtattatatcatcgatatattcatcaagaaaccagtgtcacaatacgtggtggatgacacagttggagattttaccatagatgatgatgctcatcgccgggaggctcttcttgctggccaggatgagtcggattcagccgattcggatgatgaagaagctgggaaatctccgagaacgacctcgcagccgaaggctactgcagacgctctccagggagaacgtttacttcccgaggatgacaatcctgttcctccatatgaacctccgagctcgagtggcagtggcgaggaacgttatctgaaagctagttcaacacagcactgaatgttgctttgcgttcttgctttggaagtttcatatttgctttgttttggtgttcatggttatctttaacgtgtatacgattacttcgttcttgcatattagtatgatttttctcattttcctgctatctaatgtgcatatatctaggttgtgcctaggtgtacttggataacatggaactgttactcgtattcctcgttatagtcagaatcaacctatccagagcgacattgaactacatggaatatctcttattctatctacttgcctatcttcccccttctatgttagcctttttactctcatcaagttcatttaactagaggactcaaggatgtcaaatgagtctatagctgtgcatggcctcggattctggtttgttgccgcaaaattaaggcaacagtatatgccgccttccacaccgctttgatctgcccattctggaaaaatcaaagaagaaaaatattcaagctccgcctgaggaagatttgcagcctacaattgcattattgcattcgagtataaattcggtgaccgagtctgcaagaagttgtgcttgattggcagatatcctcacaccaattaccatgcctaacgtagggctaaaagaaaagtccaagcggacgaccaccgggtctccgttcgagaacactacggccaatatccgcccggaggactcagatgtcgagatgggcgacgaaacgagctcggatgaggacgatgtgcccgagaaagatgaggcagagaagaagctagagcgtctgctttttggcgacgatgaggggttcatgggcgcattgaagagccagcaggaccgcgaggccggtatggctctcactttgcacagtgatgatgagagcgatgctagcgaagacggggaggaaggcgagggccgggatttggctgctctggccgactcagacgtatgcgactccaccccaatgcgttcgcagatcgagggcttttgatctaacaattctgctttcatctagcttttcttccttgactccggtgcaccccctaccacagatttcatcggatcaccggaaaccccgtcggacgccgaggacgacgaagaagaggacgaacccgcggtctggtacgacagcgatgacgagcgcctcgccgtgtcgctagcaagccaagccaggctgcgcaaactgcgcaacaccgaagccgaagatgtagtcaacggcaaggaatacgtccgacgactgcgaagacagttcacacgcctgcatcctacaccagagtgggcgacgccggagctcaagcgccgcaagacggactcggacgcagacagcgaggaggaaatcaactcggacgacgagaacgagaacctctctatgcagcctctagccaagctcctccaaaatgcctccgacctgacgcgcatagaagacaacgcgcgcggcggaaagcgcaagctgcgccaggaagtcatcgacatccagagactaaaggacatcggcaaatcccaaccctcctccgtcgactccctgtccttccacccgcactacccactcctgctctcctccgggccagcctccaccctcttcctgcaccacatttctccctccgcacccgcgcccaaccccctcctcacctccctccacatcaagcacacacccatccacacgtccgccttcgccgcacccacaggcaacaaaatcttcgcctccggccgccggcgctacttccacatctgggacctggacacgggcaaagtcgacaaagtcaacggctcctccgaccgcaaggaagagcaaaagtccatggagcgcttcaagctctccccgtgcggccgcttcgtcggcctagtcggcacagcccgcaagggcggcggtctgatcaacgtgctagacgccaacaccgcgcagtggatcgcccaggtgcgcgtcgacggccgcggcggcgtcgcagacttcgcctggtggtccgatggcgagggcatgaccgtcgtgtcgaagaacggtgaggtctctgagtgggacggacgtgtcggccgtgtcgtggcgcgctgggtcgatgccggtgcagtcggcacgacggttctcagccttggtggtcgctcgggtcggatgcagcttggtggtgatcggtgggtggcgattggttcttcgagcggtattgtcaacgtgtatgatcgtcgcgaatgggcggctgcgtatgcgaaggcttcggctgctgagaaggattcccccgtccaggctggtatcccgcgtaaccctgacccggtgcgtgtgcttgatcagctcactacacctattagccatttgatctttgcgcctgatgggcagatgatggttatggcgagtcggtggaagcgtgatgctttgcgtcttggtatgttttctggctctgcttgtgggttgtgttttgtgtgttcttgctaaccttgtttcttttatagttcaccttcctacctgcacggtataccggaactggcctacttccaatacgccattgggtcgcatttcctcggtggctatttcaccgaactcggagcagttggctgttggtaatgagcaaggtggcattcggctttgggagattcggggatagagggcccgtctgaataaaatatttatgttttcttgtcatatatttactaccccgatagtggcacatgcttttcgttttgttgtatagtcgccggtaaatcgacgtggtctccgggtataaagttagggctaagtccatgacctaaatccaaggcatccatccaatgactgattctacttctgttcacgggcgcatgattaaaaggaagctaaggtaatacctcagggtttgacaaagtatgcgcgcaatattactttcgtagtagaccattcattttttaaagtcatagctgtctagcgagaaacaaaaacgcagaacgcccagtatccaaagagtagagtaggaattaagccattatacacgccatagcacatgcaagccgtgtcaaattaaatgaagggtcatggtctcattcgtgcgaatgagggagggatctatactgttggccttggacaaggattttcagtaacaaaagggtatctgggggaaacattcaagggaaaaaaagaggaaggaaaaaagtaaatagttagcaagacatccccggggtgcttggctaaatttaggctgggtataaattggatctttcgaagattccgacggggaaagagggggcatgggcagataattcgtaaccgtgatcgatgagggcttgaatggatgccacgaaaggctactctcccggtctgcttgcgccccatcgcttgggtcgcttgccttgctcgacatagttcttgacgacacagggggaacgatcgggtccttgacacaccttgtgacggttgaggtgtttaaacttcgggccaataggtccgttcacgaagtggtattggcctgcaaatcgatactgacgaggatcgcttagtgggtagaatttgtcaccccagtggcccctgtaatggaaccattccgttggcgcagaaggggtgaatgtggacgcccgcaaatgctcgttgtcaaagtcatatgtgtaggcttgcgagttgaggagaggatcccatagtggaccgcgatcggttacatcgtgcagcagtccccagggaagaaggtaatcgtgcactccggccgtggcatacatggcatggctgccctctgcagagtagatgacgggctggcaaggtatattagtaaggttatccttgccgcttgtgtaattgggaactcacccgttgtccgatcttctcaacggcttcatagctataagcctctccgccctggtgggcgctgaagaagagcgctttcgggttgccattgtggaatcgcaccagacaatgctcccagtcgccgacgtgattgccaaatcgcacattggcgacagtgttaccgaggttgaagctataaaagtagaaccagaacgcatcgacaattccgttgcctttgtccatcaccaccaggattgcaggggcatcgcttcgaccaccggcagcatcctggtggatctcctctccaccgtaacgttttcggatctcctctctgagtatttcctgagcttcagaatgttcgtcggtgtccgattcggcagcttcttgttgcaattggtaataatcataccacttggcacgatcctcctccgtgtcgccggggatatcaccgtcgactcgaccatcccaatcagcccaggattcttctttatcgtccccatctgcttgcgggatattcttatcgccttccagccagtgtggacgcgtctgcgcatcatcattgctcgtcaaaaaaacgtgccgtgggccccactggttcaactcatccagatcggccagcgtcggatggtcccattgggcttgaatcggggtgtaattgagggtcggagtggtgtggtacaagtgctctgcgatatcccccggccagaattgctcaccggaataaaggtgaacgagtggggcatagtggaaaacgtagtccgggatctgccgccgagcccgctcctcggcatcccactcggactcactagcgccgctaagccagaaagaccgccatggtgcctctggctcggcatcttgcgctttcacccactgcgccggatcgcgatgtccgaatgcgccgaggacggtttgtatatgggaggcgccgcagacgcccagccaccggcaggatttgcggtcgaaccacgagcgcgagctcgcaatccagctccgctcctcctggtcctcggtagaccagacaaaagcacccggccggaggatgtggattaagctgttgatagacacatacgctatcagagtcgagagcacgccgatggttgccttggccttccgggtcatctgctggagcgagtcgacatagactgtcaaagtagaagaactatgtggggtatgttcatagactgcgagttcgggaattccagtcgaggctagcggttcaatgcggtgggattcaagtggtagggctgcagcaggtgggcattccccagggactatagtgggacgagagataacaaaagttgagacaaggagggcgcacaacagggccgtggggatacctatataaaaacacacggtccctttgttagcgagcccgagaatttcccgactaagaagacaagaaggtaaaggaagaaaaatggcataggatgatccaatatcgcgagctagtcagaccgggaacctgcggaaatgggtcgaaatcatagccaagccggatgccatataccgagtacatgagcttatccgtcgaaagccggagcggaagggacgggaacttacgaagagatgatcccattgctcccaagcgtgcagagtggaaaacgtggaagttgtttaagttgattaaaaggcgttgcggtgagatgtgggctttttcataaggctgaagccaaaggtctgggcacaactctcctcccagataagactgtataatgatcctggatacacagccctaatgtgacccttcataatgcattgtgctcgagaataaaatgactcaattgtccacgaaatcccctccatctgaaacatgaaaacataaaaatatgcgcatgttcaggccgttttcgccaccaggtcccataatattctgttgatttcgtcccaatcgggcaggagggggaaaaccttggagggttcaccgcttgcagaaaaagctgactcagattctatcttatctccacttgacagaccaccgggcgcatccagaccttccaattcgtcattgatttgtcgatatacaatggtggactccgaatccgatggagaatacgagtatgaatatggcacggagacggaagtgagaatcatgagcccggtctgctctcaatggtactaatcatttgacagagcttttatctcaacctagacctgaccgcccaccatggtccagtgcgccctccacgccgtcgcgcaaaggatacagggtccctggaggatagccaaaaccctgcagaggacatgagccaagcctttccgagcgaagcttatcatccgatcgagagcgccgagacaggcagtctcccgaacgagcggatccaaattctcgacctccacacgagcaacccgatcatttcatactacaatcaaatgttcagttgctcctgggctgaccaaattggcactgagctagtttttgtccgtccgggcacagagacagacaaccacttccctcaaccgctacaccgtggagccaactacgagcttgtagccgccaacagcgtgaagatcctcggccgcaaggcacagctcgcccctagtgctgggccaggaccagttcaaggctctactgagggaacctcaagcacaggacctaccgcggagtccgcgtcttctcagggcgctgaacccctcggcgtcccccgtcgtcccgcggcgccatctcatcaggcgcagtttctccacaggttgcagcagatcaaaactgccaagggagaaaccgataccgttcgcacggtcatgagtacacgtcggaatgtgaatatgacggatagacagcaagggtgggcccggaccgaggcgcaacttgccgaaatcgagcggctcaacgaacgggctttgagaggagacttggaggccaaggcgactctcgagctgctgattcaagagctaaatcctgacgaggccgaggcagagtctgagtccgactcggacttgacgtctgacagcgatgagcttacttcatgaattgcaaatcgacaatgtgctgatattgggtctagctgtgtctgtgaatcatccggagcctgaacagctacctgatgtcggtatctcagtggacctacgttgtagtacatagccgaattgtcccgccggaaaccgcggaatagcgccagcgaggagatattgatctcctcgcgggaagcaaaaaccctactcccgtgatggagacacagctgaccctcttctctgtgatatcggaggaatggcatcacaacggtcaacccgggacatcctagcaaagccatcaccggtgacaagccccacccagctcgaccgagcaaacagcccatcggtggagccatctcagctacgctaaaataggtggatctactccgtagagcagtaacgtcattcacaaacttaatgtaggaatgacatcccttgttccatttaaaattactgatcacgcaaaccatctgtgaacgataaacaatgatagaaacatagattgcgcgaaccaattgtatcctgtatctgccccgttcgacatctagaacatgtgcatagagcacagagcaggttgtgcgactccattaacttccacaatgctagactggtgacgtcgtgatcggcatgatcttcacatgcacaagtagatgggccgttactcgcatcggacgacaggttcctagctgtgtatcttgtatcatgtacaacatagtggctactccccatcgccggcgcacggaactactgttctagacaccttctccgactttccgaggtaaagtgcgattaccggacagcctaggttagattttagaagaattaactagttagaaaaagcttagttgtaatgaaggaattatgttgcaatgaagctagtgtctacaaagcaaatgtatacactggacaatatataatagtaagaaaagatgtcgagtacatatccatattaagggtatacaggcacataatgaaataagaaaatacccaattgatttctgattcggaaagcccagggaaaaaaaaaacaattataacaccaattccccagacttttgaaaagcgctccaatgcgcaaaaccagaaccagataataaatgcccgccaataaacacgctaaatccaagaggcgacatgtaaaaagaaagacaaagacaaagacccaaagagaaagacataaggctaataagcatcgcggatatgaagtcgaagaacgagtagtaaaaaggaaaaaggaaagaaagagaacaacggacaggacggggcgaatctgcccaacagtgccatgcacgcaagaccattatcgggaatattagatgatggtacaatgatttctcctgagaaggtcgagaaggaagaagaagatgtatcgaagaaagatgaaagatgaaggatggtatgatcgaaagccgaaaccgagaaaggagaaaaaggtgaaatcactccaggttcagactggggatatcattgtaggaagccgtgcccttggagaaggcgacgggcgatgggggaggcgcggggggcatgccgtcgatgaggatcgagcgggtcttctctgccttttgggttgaggctgtcatgatcgcgcgggagatgtcttgagacattgagaaggaaggtggcatgaccggggtggcggatttggttgcgacggaggccattgttgtggatgtatagggtttggtttgttttggtgtagagagatgatttagacttgaggttcaagtgttttaggtagggtgaagatggactgttcgtttcggtttacacttgggaaagtatggggtagccagataagcaatgtagatgggctgaggttcgagagtaaatgtcagcttctgttgcagagtgcttgtgctttgtaggctatagatggactttgcggctccgatgttgcccgagtccggccccggtcccgggggatcgggtgtgatgtggcaagaagtgacgggagttaaacttacaaggagaaaaggaatcgggttcggctatttgcgagatgtaatagtaacagtaagagtagaagtggtgaggtggtggttgagattatagatttcttggagatgtgaagaggctgaacttgagtattgcaggtatagtatgctccgtagaagactcgaagacaataagagcgaaggtgatagcaaagctgttgacagtgctgggtataataatcgtaaaggtgagtgagcagagaaaaggagcaagacgatttcagggtcaaggagtcgtttatatttttccccttctcattaaaaaataatataaaaaaagaaatgagacacccaaaacagacatccccgtaaagtgtggaggagtacattccctggggaagcacgaaagtacccagtacatacacgcatacctggccaggcctgatgcttactccctagagatctgccatgtcgattcgcctcattctaaacagcccaataacccagttatcgaggtagggggacattcatcggaataacgggagccaaacccggaaacaagaaaaaacaaaggagataggcctgacgcgttagtgtggggaagaaactaggggatgagaatcgatgaatcaaccatttgatacctggttatttcatatgtatgtcctctgtatgtattgcgttattgacattgtccattgtctggtgggaactactccgtagcgaaagccggttgaaccggttgaaccggcaaagctctttacagaactaaaaactagtgctacttaagcgtcgttttctatgattctagcactccgtacgccttctagcgttgcccggagaaaactcgctttcagacctcggcacgagagcggagacgacgatcctttcgagaacaaataccggggcccagcgaccaaattgccggggttatggaagggggtttccccgttgcggtgtaggagatcggcttcagggtggcgacaggaatcggagctattatttaatagacctgcaatatccatggatgtatacatccggggaaaaggtgtgatcggatatgtatggagttcaacaactgattttcaccgtctattggaaatacgccaatcaggatttttgttctattttgacgtgctcatcaattcccaaggtgcattgtcaatcaggatgatccttcaaaaattgagacgttgagctggatatgataaaaggggctcaagtaccggtatacccacctatagtttaactccacatccgtctgataaaacaacacttgtatggaatagtatattgtacagcgccacagatagacctgtaatagtttgggagtatacttcgctaggggccgaaacgtctggggcacagatcaaggttgtttgagatgtgttgattttgacgtacggagtactccgtactccgttctccgatgccaaaggcttcagcaattcctgattcacagccaccttggtaaattcaggggcataaacgttgagctgcaaaagtaccaaaatccctttgacccgttctaccgccgatcgacgcgaataggggactccacaattcttcttccccggattcaaggggcgagtacggagtacggagtacatacggagtagtgactatttaatatgcactccactgccacatattctcacaatgtgacgttatctgggcaaggaagagtgttactctcagtcgtagaatcagaatgtccattcctgatttcttgatttcctgggtaccgggtctccgacggtgaggctgggcgtgttcgggaatctcgaaacccctttgatcgcggacttcccgtggtatctgctataataatagcaacactatattactacatcatatcgtatcggcaaattccatatgtctgatatacttgcatatggaggcgcaccatgtatcccaaagatttagataacattcttttcgcgacgtaagataaggtctcggcctggtgacttggcctgttcaccgctcgttgagaggtacttgtgatttcaatgatagattgtagcgatctgacaaagaggggaaatgacgagttggctgcccagtgtgttgtgagatacaccattttcgacatttgtggtgccaactgtgggatggattcgtcaggggcaatatgtacaacacatcctatgcatgattatgagctgacgtgatcgtgggctgctcgttagttattcggactacttgagcataagaccaatgttggtctacccaataccgcagttaccgacagatgggatatccttgtaggcgccagacgtataagagagacactcttggactcacctataatagtaccccggcgtactcgcggacccctccagccaaacaggataaggcgaaggcagggctgatttgctcgatacgcaggggatgttccgatcggaaaagatcgagaccctctgaaaggtgcccgattcacagggcactgacgaattgttgagtttggaatcgcgttctatcctggcccttgcacgtcttcgaagatctctaattataaccccttgggcttgtacccaagatcgatcttctaggaacgagagccctttatctgcaactctgaactctatgccacttccaaccttgcagagaatatgctttcaacgacgcgacctgactatcttcgagatgatcttctgacctgctggtcccgtgccgtgtcctgtcttgggacttgactcacaaggttctccctaaatgccaacacttgggaaatatatacagagagctgtgaagtggcagctgagctcgtgtcggatggtgacaccaatcaggcatccgcaggccgtgagaaaaacggggaaccagctgtatgtgtcagacgaactaggagaacccgtgaataagtatgttgtacggagtaaatgaagagaccttggggatcggaagaccatccgagcgggatctccccagactcgagaaatctagatcaatgccctgaggctattttacgtcacggggcggaatatcatttcccctagaggacagcaattacttcatctctcggtggacggcgggctcttccaatcgcaagcgcgccgagagtccgccatcacgtaaacgccccgccaggaaattctggagatgcgtaaaagaaatgcaattgatgtagttgttggggtaaagacgtgccaatgcgtcttttctaacgaatgacagggtgaagctacgagcgtggtagaagatgttgatgtttaccccgcaagtcatccaggtaccagccctggagagcccctccggttggagatatgacatacacatgtaacatgggagatattgatagtctatcaccggctttcttccaaggttgtcaccggcccggcgacattcgcaaagattgcctcaaattgcaattggccttgcctcaactggtcaaacacggcaaactcctcttcaatggcgaaaatcccccggaccgaaacagccaccagtggagctgaaagagagtagggcagtcgatcacgatgcgatctggagcagcgccattcgggctggaacacggagaatgaggcatttagcaacccaaaaaaaaaaactcggaagtttcttatcctagggtgggttcatgacacattgcattccacgatgttcggcagcgatcacatcattccctgtatacatcatccatgcaccctattaagacatctcaggtgaccccccgtggacctgctactatgctcttttcagcttccagcaagtctcttccaggtcacccgctcacctctttttacccctgttcctgtcctcagccacgttccagactgttgaggcaattcttttcgtctcatatcggcccgcatgacgcagcgggattttgctatcggcttgagttcggaaggaggggcgatgagctccaatcagcggagaatgtatcgccggctgttagtcaaagtggagagagaatgatcgttttggggtggaacaaagtggaccggcggatcttaatcagcttcgagacctctatacggttgaacctccccgcctattatcggttataactggtgggagcgggacgtaataataatagaataactaatggaaataagagagtatgtattaatagagacagagataatagggcttactagggattagccagggacgaatagagcagcactagtaaaagctgagaatcaggttttgttgtgtataaaagactagggttccccggattttctgaatccttctgattcccatccattctcatttctcaccttcagtccatggcgacgattggtgatcattgtatttgccagtaagtcttacagcgtttcttgtcctccttgcttgttatcttcgacctaccgagataagcacattctttgtgtcgccttatctcatctcacacgtgccagatgattcatctgagctcatgctgattgccttatagcttctgtcatcttctcgctcttacgtgttaagagatctgcctcacatactgcatcatgtcgtctccagtaactaccccactgtcggagactcccaatggcactggcgcgagcttgcctaatcgcccccagcctaagctttttggaagccaggatggaagctccggctccggcacccccatcggtttccagcgctttcctccccacaacaagcacctagatcatgccgttggaaacgctttgcgacaaccgtccccgcagcccacgcacttggggatccccggtaccccgcaccgtgtgctctccgaggaggacccgggctacattgcggctacctttgagggcaagcagaaacagatggaacaaggtcagtggggttgacaaatgtggggataatgcaattagctaattcccagcagttatggacatcttggaggagaagggcttcttccccagtgactttgtcatctccgaaaccacctggttctataacaagcttggcatcgacgatacctacttccagaccgagtctgtggatgccatcgtgacccagatcctatccctctacgccgccaaagtcgccgcctatgcccgcgatgataagcagctggagattcgtctggataaagaggccgaggaccatgcggtctacatcgataccagcaggcccggtgcggtttcggtcgatggtccacgctacgagcagcgcatcgacgagaagtacgtcaaccactccaaaggtgccaacagctaccgcgtggagaccttccgctcgccgagcactctgccgggcgacaacggccagcagctccgctgctacttcgtgtacaagtgccagttcgccaaccccaacccctcaccgaatgagaccaacatcgatatcattggcgagaagcgcttcttgcaaaaggccactcccaacaccaaggcgatctaccaggaaatcatcgccacggccgttggtcgctccggtcctgtgattgagatgttcgagattgagggaagccgggaaaagcgtctggtgattgcataccgccagggatccgctctgggcttgttcagtgccctgtcggacctgtatcactactaccgcttgaccagctcgcgcaagtacctggagaacttctccaacggaatcactgtgatttcgctctacctgcgtccctcggacaagtccgaaatctccgccaaattccctcccattgaggctgccatccaccagatcatgaaggaggtctcactcttatactgtatccctcagaaccgcttccagagccactttgccactggtcgtctgagcttgcaggagacaatctacgcccactgcgcgtgggtgttcgtacagcagttccttaaccgtctcggttcagaatacacttcgttggccgctcttttggatagcaacaacagtgttcacgcagagttgctctccaagatcaaaaagcgtctgcgtacggagacattcaccgctgactacatcttcgaaattatcaacaaataccccgagctgatccacaagctctacctcgacttcgccaacacccactacgttcagacccaggagtctggtgatgacttcctccccaccctcagttacctgcgtctgcaggtcgacgaggtcctcgatggcgccaagctgaagcagctcatccgtggcaccgcccacaacgagcacgacgagatggttatgacctccttccgcgtgttcaactcctccatcctcaagaccaacttcttcaccccgaccaaggtggctctcagcttccgcttgaagccggacttcctgccagagcatgaatacccccagcccctctacggcatgttcctggtcattagctccgagttccgcggcttccacctgcggttccgtgacatcgctcgtggcggtatccgtatcgtcaagagtcgaaacggagaagcatataacatcaacgctcgctcgttgttcgatgagaattataacttggccaacacccaacagcgcaagaacaaggatattcccgaaggcggtgccaagggtgtcatcctcttggatgctgaccaccaggacaaggcgcgggtcgccttcgagaagtatattgacagtattctcgatctgctcctgccccccgtcagccccggtatcaaggatccgatcgttgatctacacggcaaagacgagatcctcttcatgggtcccgacgagaacaccgctgagctcgttgactgggccaccgaacacgctcgtggccgtggcgctccctggtggaagtcgttcttcactggcaagagccctaagttgggcggtattccccacgacgtttacggcatgaccactctctcggtccgccaatacgtggttggaattcagcgcaagctgaacatcgaccccgcaacacagctcaagctgcagaccggtggtccggacggcgatctcggatccaacgagatcctcctgtccaacgagaagtacggagccattgttgatggatccggtgtgatctacgatccgaacggtctgaaccacgaagagctcatccgcttggccaaagcgcgcgcgatgatctcacactttaacatgaccaagttgtctcccgagggctaccgcgtcctggtcgacgagaagaacatcaagctccccagcggcgaggttgtgcagaacggcatgatcttccggaacacctaccacttgcgcacgcaggagaagttcgatttgttcgtgccctgcggtggccgccccgagtctatcgacctggcgtccgtcggcaagctcatcaaggacaacaaatgcatcattccttacatcgtcgaaggtgccaacctgttcatcacccaggatgccaagctgcgcctcgagaaggccggctgcatcctgtacaaggatgcctccgccaacaagggtggtgtgacatcttcctccctggaagtcctagcctcgctgtctttcaatgacgaggagttcgtcgataacatgtgcattgacgaggatggcgccgtccctgacttctacaaggcctatgtccgcgaagtgcaggagattattcagtcgaacgccgctctcgagttcgaggctatctggcgcgaacatgcgcagactggtgtgctgcgcagtgttcttagtgaccgtctcagcttggctatcaccaagcttgacgaggaactccaaatgaccgagctctgggacaatgttgggctccgtcgttctgtgcttggcgatgccctcccgcgtcgtctgttggagaagatcggtctggaaaccatcttggaacgtgtatgtctcccctccttctcttcttgtatttgaacctccgctaataatcccaggtccctgagaactacctccgtgccatcttcggcagccacctggccagccgcttcgtatacgagtacggcaacaaccccagccagttcgcgttcttcgacttcatgaccaagcgcttggcgaagcttcagtaagctgttggaattagacattcctgtgcgaaagtgctagttttgaaactgttttgtcattatttctgtttttctttttgagaaagacttatccgggtcagcgaaatacttaatacggaacaaaagaagacctgttcccttgacgaatgtatggtttaaaaagtttggcgagcgagaacagagagaggccgcttgggcaagatgatccttggaatccaaattcctacccattggaactgccatagtcctacataactctatcatgcaaattctattatattacaccaacccctcccaatgcttacttccatctgttttgagacgacacagtctcagccataatcagcacgatattcactgccttttaggatgttagtatatgtcaataggacacccggatcgtccttaaaacagaagaactcaccaataacaaatcaactccctcagatacctcaacctcccacctcggcctcaacttcactttggatctactgtagtccatcacattgtgtcgcgagatatgcatgatcttctggttacccatcatgacacccgtacccgacccagccagctgcttcactttcagctcgacttttgcgccgggcgaagcattagcttcaggacggggactggttctgctgctgccgctactgctgccgggactggaattggcattccgcgacgcagatgtagacgcagacgaaagaaacggtgaagccggcgccggctcctgcggcggctcaattgcatcgagcagatcgcgcaaggaattaggcgagttccggcgaacggaggcgtaggagggaaggagtgttggtgctacaggagcctgaacgggatcttgacgtgaatgtggatgtggatgtatatctttctcattccccgcatccccactcccttcttgacctctaaccccaaccccaaccccaacaccagaaacagcactataaggcggcggctcgtcatccgacaccgccaatccactcccactcccactccctacacgcctctccctaaccgccgacgcaagcgcattcacaaaccgcacatcaagcctaaaccccccaccaaccccaatcctcgacccgggcccatccgtcacccacggcgtcgaagcaaccattaattccgcctgctgatcagggagtcgggccacccatttccggatcggcagccacgcgcgtcgcaagacgagcaccggcacgtcctcggcatcgcagactgtgcgcgtcatgtttggccatggtttgccgtacacggtgtagaggaggaccgcgcggttggggctgtctggggtttcgtgggcgcggatgcggtggatggtgaaggcggaggcggtggcggaggtgggggctttggggtgggctgtggagggcgggctggtgtcttgagttggggttattgttaggattgttgcggtgttggctagcaggtctgcggggggagagaggaggtggtggggttggagagctattggtgttgcgggggatatgagggggttggtttttgatttggagttgcgattgggcattgggattgcggtttggtggtggtggtttggtagcttggtggttgatgtggatgttggagggattggttatatcttgtaggttgtgtatatagagatctaggaagttgaagtgatgttgctgagtgggggcgggagtgccggatacgttgtagcactgaggtcaccaattaggaatacagtatatataaacagtcgaatacatcagggactatgtaaccttccatcgcaagtctcgtgctcccctatgtatacaaagaagaatgaagctattcgaacacaaggtcattattatctacggacataacggatatagtatgttgacctatctaccgaggcatgatatataactacaccgactacggagtactacttacatctacgcctcccaatacatacctcataatccattcaatatagttagcatgtcttcaatcgtgccaattttagcacctctagacccaattagaatctcaccacggacagatccttcaccgagtggaacctgctggaaccaggcccacaatatgccgccgaccgaggatagaggcgcagtccagaccggggaagaattatgcgttgaaaggggcaattggaagaaaatcagcgcgagggagttcgtgcagcatcattcgactagtgctgtatgttctaaccaaaggagattagccatgttagcgcgggttagtggctgggaagcttattttcgtctatctaatgccaattgccagatatcaaatggcagatgtcactccggacgtgtcaaacatggatctgtcagtccaccagcccatgagaatccagtacgtatccatcgtctgcttctagttagggcatgccacgaatagatcctccatattacgcgttaatagtgcaggcgtatggccataactgcaatgcataaatggcactacgtggggcctcgaaccggtttctcctcattttagacaaaaggaacccacttttccccgatttcattttctttctttcttctttctaaaatatgaggtcgaaccgtttgtggggctgttactagactgccaagttagcatcctttgctatgggggtctgctaaaggagaacttgccctctgacatttccctagaaaacgagtcattgccttccgtccatattcgggaggattcatattcgccgcgtcgtgccatgtcggacgcacaggaaaaggcgccgccgatccctcctcatccttctgcggggactgccgaggcagaccgcgctgaaggcagtgatcacaatgtcgattccaacgcagaaacccttcgtccagacgaggcgcacccggagcccgaaacactttaccagcgatgtcgggcagcaggccggcggattcgcaatcgcgctgtcatcatagccgagatgctcgggcgaccacatgaaaaaggggatgggttgaattcgccaatgttgccagactactatgaaacactagacgatatccgagcatacgaggcccgccaggcacttgatgaggaagcgcgcctcccgggaacagactatgattcacaagcgcgcctcttgatggaacaaatggggtcccagtccaggctacggcgtccacaccatatcaaagaaccgtgttccgggtcgacaacgccaggaacgccagggactccagatgagtcggcaggacctggcagtccacccggagggctcttatcacatcttctccgtgtatacgccgacaacctccacgcagcccggctgagtagtatgtctacagcgtcagaacccagcccggacgcagaacccaaaccggacgcagaacccatcgcattacccgacacaacgacgggtgaaaagaaagacaagtcgaaatggtacaaccaccccaacaaaccctcccacaactatgcttcctccctcgtcaatgcatccatggatttgtgccgggtcgcgctccccggagccacgggtccccctcccgcgactcccaacgaacgaaagaaggaaaaccgcaagggaaagaaaaacatcaagctcaccgtccacattgccgccattctcgcccgccagcagtacatcatgcagctgtgccgcgctctaatgagatacggcgccccaacccaccgcctggaagagtacatgatgatgacatccaacgtactagacatcaaagcgcagtttatgtacatccccggatgcatgttcatgtccttcgacgaccaggtaactcgcaccaccgaggtaaagatcgtccgcgtagtgcaggggctggacctctcccgtctcgcggaggtacacaacgtctacaaacacgtcgtccacgacatcatcagcgtggaaaaagccatccacgagctagaccagatcatgcagcgcaaaccgcgctataaccgctggctcctcatcctcctgaccggcttagccagcgtcaccgtcggcccatactccttcagcgcccgccccatcgacctccctatcatcttcatgctcggctgtctagtaggcttcatgcagtacgtcgtcgcgcccatctcagcgacctactccaacgtgctcgaagtcaccgtcgccatcctcgtctcgttcatctcgcgcgcgttcggcagcatccagcataacggcgagcgcgtcttctgcttctccgccatggtgcagtcctccatagcaatgatcctcccaggcttcgccgtgttaagcagcagtctcgagctgcagtcgcaccagatgaacgcgggctcgatccgcctcgtcttcacgattatctactcgctcttcctcgggtacggcgttaccgtcggcacgaccatctacgggctgatggacaagaacgccacgaacgaggcgacgtgctcgcatctgccggaggtctggggcaacgaatacatccagcacttccccttcgtcgcgctgttctgtctcttcgcggggctgatcaatcagtccaagccgagacagttacccgtgactatcttcatgggtatgtgcggctacatcgcgaattactttagcacgaagaagctcggcgcgaaccaggttgctaataccgtgggcgcgtttaccattgggcttctggctaatctgtatagtcgggtgtggcacggccatgcggctgctgctattattccgggtatattcaccctcgtcccgtcgggtctggcgtccagtgggtcgattatctctggcttgcagtatgccgaagctgttgcggcgggtgatgctactaatagtgcggcatctaatagctcgcttaccgcgctgggatacggcatgatccagacggccattggtatttccgtcgggctgttcatctccgatctgattgtttacccgcatggaaagaagcggagtggaattttcagtctgtagacctccatcttcgtttatattgtattatttgcattagcgtcttgattccagagcgaaaaaagcgtcccatttatactagatattaataccgaatctcaatctcaatgtcatgtcacaatatcaacatcaacatcaacatcacaatgtcaacacagcccccaaaaaagcaatccaagcaggcaaatccgcaacaaccatccgaatccggtgaatccccacccatcgtcgcatatcagccgacgcgcccaccccactctcgcccaaatcctctctaacagcaacgttatccacaatcctcttcaccggcccggcgacaaacggcacgaagaccaaatgtccgaccgcgccggctagccccacccagtagaacgccgtcgtctgcagcggcttttgcgggtagtagcggttcaagaagagcgtgccggccgcggaggttattgtgccgaggttcagggccaggacggtccatactgcgcggttgaagacgtgggagaaccattttggtaggactttgtcggatgtgggttggagggagggctggaggaagcccgtgttggttgttagttctaggatggcgtgtgcgagggtacccgtgctggttgctaagggtagagtatggaggaggaggtatgggtttaggattagaccggaggccattttgattattaggtggtgagggtggtgagggtagtaaggtgggatttagatgggtgagaaagggagtaagtgagacagcaaggcgatatgcatcaattggggccaaattgactaatatccgtgggctggtgggttgatctcaccttcatccccgttacgctgacaatggccagccagcttcaaacactctttcaaaagcattctcagatatggtgatttcagctaggctgaaaatgatggctcaccagacataatggaagatgactacagcctgatgttgaatgtttgtccccttcagtcaaacacatacttcatctgatctcaacggctctgtataaatatcctcagcatcatgctcaacttctattccttgtcaaccttctccatcaatttggcttatattatcactggtccatcaaatatcggcctgcccattcagcttacccttattctaccaactctcatcttactttctctcacactcctctcccaaaagaccatggactgaggagagtccctcaagtcttctctcacgaggaccttaatgtccatgccaaatcggcatatctcaccccttacatatatttctctatataatcaggtgagttcaaggcctatgaaataccatctgaactggaatagctaatccctcccagcaatatagctagtgcaaattcctccacattattgacgagaaggtcctcctacgcatcagacgcggctacaacactcccgccgacaagctagaacagcaatataccaaccttgtcatggtcactgagcgcgtcggtcggttggcacaccgacctgaacttccaccaacctggaggattcaccccgtcatcagcgtgcagcaatgagagcctgcgacgacggcagatcccttcggcagggaggcgaaaaaagtgcacgcagcctatgccgagcggttctggagcgtctccgatgttgacgccgagactgtccatttcgcaaataccgtacggaagtgtgctatatataatccgtgaggggaatttctcccgtgacagacatctgatgtggaaagcaaagggagctgaaatataaccgagaggtatatctatatatcctcaatggtaaggctcaaccacgcagcgaaaaacttaaccaaagccacacttctaactatcaaaacgcgcagggcgatcttacctgattatcgaagaagcgtctcaaatggtcgactcacaagcgctaaatggtatcatgcgcaatctgaatggggttgaaaaaagcaatccttggtggggattgtgcacagcttccaccgacggtgatatcgagagacattcggtggatgcctcagaaggcaacaattatcccggcattcagaagaccggatccaaaccctgccctcgaactatcgggcaaacacggtgctcgatcacagggctccggaaatgtcgctacaacatacgaggaacgtggccttgcgttcaagaggttgcgtctcttgatgaccagcaactgcatcgggccgtgggtactctggctacgaagcgtggctggcaatctctacgcgaccatccacctatccattggtagtcgtgtaatgctgctggataatctctggatgcagcgcgagcttttcaatgggtagtttgggaccggagaggatatagtttggcctcccggtaccatagatcctcgtcgtgagcggccatccaccatactcgtcaggtttgacgagtacactggtcgcgggattcggccagaaatatcctcagcagtctcgattgtccgttccacccgcgaatttttccttgggacaatacagtgcactcgtacacagtttccagtaatgctagcttatgcgatcactgtgcacaagtctcagggtaagggtggaccgggccgttcttaacatttccgagagaccccaatcctctggactgcactatgtggccgtctcgcgtatccgcactctccggggtatcctgttcgaggagagcttcaactttgaccgcatccagcctacacagcctacggcgacaatgcttctacgtttcgggaaccgtacccggcgcctacctcagcatattacgcgcgaggctgttcccgaatcccccgtagccagtcttctacttcgaccgtctccgcggcagtccactccgtcccgaattccaatccgctctactaatgcttcgtactcgagttccttgccttcttggagaagtacggaaactgttctggttcgtcgctcagctgctgctatagccttgtcattcatttactgaccgtattctattacttgtacagtcacaggctccatttaccgacgattcagaatatatgggttaaggatctgacagcgagaaaatgaagcttgaacgtcacttggacgattcgtaaagtacgcgtcttatcgaaggcgctgaccaaacacgcgatgcggaattgaagctttgtgaagacgatatcaaaatgagaagatcacaggcatggaagataatgtcaagaagctgccgcctcaacatgcctatccttttccacgcctcactgtcggggatgcaccaagagataaagggggaaatggctggttaatcttgaaccaaatgacccagagtcaacacgcgagaaggttgagcttctgacatgtgggcttatatataattttagtgagttcattcttttctcatttacgtgatttgtctctattgctgagtgttgctgatacattatttagaaaagtggaacatggtccgtgaatagggatttctatcaccactttaagtccacttgaagcggtcaccagattcaacagcggatatgggagatgggaacacacatgacgagctggtgcttatatgaagattatcaagatggctggtcgacgaagaactttactgtcgcaagctctctcgcaagctctctctaggagggagatgcgagaaaggtaattataagaaggtcactgggattggggcactgaaaaaaattcgcccaacagcagacttcggttctctccaattccttgaatttcgagatacccagcaaaaagcagaaatctttgaaatcagccattgatgactgtgacgtggacgattgctgggaaagctcataccatgcgcttggttcgcaagcagaaatgggagaagggagatccactagtaagaagcagcgaacatacttcgccatctcatcattcggagccggcatgatccggatactcagagggtgattgtggaatccaagctacaggtagacagtgatgttagtgtgtccatgaagcccgccagcaaacgcctctaacaattcaaaaaacagctccacccccacaagtgaccttctcttgccctcgaagctagaaccgacataccaatccgatggagaaacagtctgacgaaaaaggggacgaactccgcgcgttggatgggaccgcaaatggctcgacaccgtccagattggaaggattaaccctaaatggatcgacacaaagagtaccgcaacagaagaaactaccaaggctctagaaaaggaaattgattcctctccatccccactgtatctgaggtaccttggacccggcagctcctcacaagcaagcggctgtcgcagctgggatatatatcatattctcttctttacggggaaacacaggccttacattagtgattttactgtgccaatagtatttacctattctcagcctttgcggaagtttcatggtatcatcgactcgcgcctattccgcatggcatccgggtttaggacatgttactccttggacaaaacctggaagtcatgcaacgcattttcactgtggcatacagatggttagctcgctccagcggatggaacttcaggagcatggaagagttttccaactttgcgctggcgttgatgattgcggtggataattgattggcgagggttcttagagagagactagaattgaatagtgaagcccgtttattctttgaaaattgataccctctacggtgtaagagtgattagattctacaagtgttatgcgaactcttttggtgacggtgattttcacgcgacgtaatagactgtttttcggtagttactggcaagcaagctccacgtctccgaagtggattactctcttgcgcaatggttgcctatgctgtgtattgtctggtttgaactaacacaatttcgcagcgctatggatgatctcgacgtatagacaaatgatatctgacttggtggatcgaaaacgtcaacactcgatcgatctcgggactgaccgctctggcagagggtgcctatgacacgtgacaagtaattcacagtcacatgtcagctcattcttccccttttttgctatgttgtactacgaattacagatcaggaagaacatacaagatatattgcatgtggtctaataactaaggctctcgacatagtgaaaaaggaatataaacaatgccaacataaatctctcatggacaagacaatcataaactctcagaaatccacagaacaagcattccacagtatgaagacaacgaagagcaatcgatcgatatcgcgaacattgagcagcaatctcgttgaattaagatcgattaattgccaatcttctccgcaaaccacaccaccagatgactgacagtcgggtgactccacgtcaaagtcggaggcaccgcaaccttgagcgtctgctgcagctggcgacgcaaagtgaccgtcatgaccgagtctacacctagatcagcgagggctgccttggaatccacatcctcagctgtcatctgcaacaccttggccacacagccccggatcttctcatccaggtacgtcttgagttccggtccggatgaaggaatcgcatcactgccattagaacccgcaacaaccggcgtgttgccagacaacgcgcccacgcgacgcaccgcaatatcattgaggatggacaccggcaccggctccccgtcctcaaaggcacgacttcgcaagacgactccgtggtccatatcatacttggcgaggtgctgccaggcagaaaaagcctcatcgcgcgtgatatctgtgattcccttggattccaattccgcattaatgaagtctgtgctggcgcccatacctaggcctcgccacgacgtccactggaaggacacggccgagtcgctcaggcgcgcccggtgcgtagccagtgtatctaagaaagcgttgccgctgccgtaagaggcttggccagtaaatccgactaggtttccgcaagaggaaaacatgatgaagaaatcaacactcttcggggggaagacttcatgcaaggctagtgcacccgcaattttgggcgcgagaacccggttgaaggcgtcgcgtgtggtttgcattaccagctcgttatccaggacaccggcggcatggacgacaccctggactgcagggagggcgaggcggtctagggccgttgacagctgctccactgcatccgacttggtgatgtctagggggaggacatggacggaggcaccgcgactctccaggaggcggatcttggcaatggcaggctggagatccgtgctgacctggtcccaactgcggcgaggcggaagagcacgtcgcgagatgagcagtagacgtctggctcctttctcgaccaggaagtcggccacctcgagcccgagtataccgagaccaccagtgatgagatacgtgccctcggcgcgaggaagcaggcgaggaccgtcactgacagggcgcagcttgctgcgcggtaggctgcggaaccgcgaggtgcgggcgattccatcgctaattcggatgatgccggcgccgtggatgtatctcatcgtggagagggggattatgggctcttcaatgtcgatgagggatcccaaatcgggatgctcactagcgatgatccgcgccagtccaaacaacggggattgggccagggcagtggcagtttgaccatcgcccacgttcgcagtgagtgtgaagactttaatgggcagtgagccattgacaatgaatttgataagttctagcaggttccaagtgaacgactcggatgcagcgggaatctctgccagcgaggcgacctcgccggggatgtaggccacgacggttcccttctcgagtgggagggatagagcgttgctgaagaagtcctctgtgccggagaactggaaagattgaatttgagtcggcagagtcgcggcatacttggccaaggtggcagcatcgggcgagatcataatcaccgtcatgatgggcaaaggctcttcggccggggtggccggtggccaggcgatttgatgcacgagactctccatgctgccacttacgccgggtgtgccttcaatctcagagaaacgcatggccgtgaactttgcgaggacctcacccgtcttgctcagcacgctaacgtgagaggtgggcactgcgtcggaggcctccttgacgaagagccagctgatcttaggcggatcctccgaggtgaatatctccacacgctcgatatgggccggcatccgcagtgcagctgtttggaagacggtagagccgatggaggtggcagcgtcgagaatcggggcccaggaggaagaatcccagggcaggggcgcatccccgaggactgcaggattgacatcaacgcgcgccagcatctccttggtattgcggtagtgctctgttaccgcccaggggaatcccatggctgagacacctactttgtccaagtagtcaattgaaaagttgtctggaagcttggtgaccagtcgcgcgttgacggcggcgaggtcgatgcgatctactggacccagaaccttccggttccaatatgcagtggtgtgagtgacccaggaggcatcgtcatccaacagcgaaggctcgctcggaatcaggcgggaaacgaccttgacctgatcctgttgcaccacgacctggacggaccgtggcgcgttgatggcgacaggaacgcggagcaccacgttctggagtacctgggcaccggtgcccttcaagaaggtattaataagaccagctgccggaacgatctcggtgccgtgcagaggatggctgccggggaacggcttcgtttcgttgtccagccgggtagtatagacgaatgtgtcggttccaggcactgcaatacgctgtcctagaagcgtgtgcttctcgacatcatgcgtgaggccagtattgaggggcgccgtctctaccttgcgccagatgggcttatgcatccaggtcgtcgtaggcagtccggtggcccagcgtccaggcatctgcgccgcccagttcacttctgcgccgcgacaatgaagctgtgcgatactgtgcaggatatgcttctcagtcggcttttggcgaaggagagtcggaatgaccgcaaaattctccatgcctgcgtccataagcgtctcattgatggagtgagacaccactggatgggctgagacttccaggaagaggcgatatccgtcctcaacggccgcctgaatggccgtggtgagacgcacgcggttgaccatgttgccggtccagtattccacgtcgcgcaggtcctggccgcgagcatcgaccagtgcggtagaatacagcttgatggtgggagccgtgggggccagagtctgtccgagcgcatctcgcaggggatccatgaggccattcagagttggactatggaaggcaatgtcgctcttaacggtgaaagttttcacgcctcgtgccttgaaggcttctactgcctcggccactatctccttgtctccagccaccacgcaggaagaaggcgatgaatcgatggccacaaccaggtcctgtcgggagcccaatatctgttcagcctcgccactaggaaggttgacaagaatcatgccgcccttgcccatgacctgtcggtataataacgctctgcgagtcacgataagcgcaccctctgctggggataaagccccggccacaacactggccgcaatttcgcccactgagtggccgatcacggcctgtggagtgatgccattgctctgcagcacggcactaagtccgatttgcatgagataggtcaggatttgaacccgatcagacgactcaaaatcgcctgtccggagcagctcgatgggtgataggccaatctcagcttggatcagctcatcgagtggctggatggctgcggagaacacaggattgtgaatcagttgcttgcccatgtctggccactgcgcaccgtgcccggaaaatacccagactacgtccttgctgatttctgtgcccaacacacggctctgagtcgtgaaaggatggctgactccattgaccaatgcttgtaggacttgggtagcatcaagatggtcgtcaactacaagcgctgctcggtagtcatggtgatctcgtcgcgtagccaaagtcgtgagaacttcactcagattatggtcttttccttcagcggccatccactcgcgcaacgttttggcctgcagggctagccgtttttcttggggccccgacaataacaagaggcctggtccagtcactgctccatcatccaggggatctggctgtaggacatgactgaactcctcgatgactgcgtgagaaacggttcctccgtagccatacgagcaaacacctgctcgacgaatggggtctgaggagggccacggagtggcctcctgaacgaccttcacgccggccttgtcccagtcaattcggctattgagctttgtcaagttggcctggggcggcaggatgcccttttggatagtcaggattgcttttataaagcccataactcctgcaccagcctccaggtgaccaatattcggcttgacggacccaatgtagcacgggtcgtcggcgtggcggtcagttccgtagacgcctgcaatggctgatatttcagttgggtcgcccaagggcgtagacgtggcatgagcttccacatatcgcacggtgctaggatcgacacccgcaacggtaagagcagtccgcgctgctaactgttgcgctttggcattgggggccatgatgccgttcgtcttcccatcctgggctactgcactgcccttgataacggccaagacattatcatggtcaagcaatgcacggtgtagacttttgagtacgagggcgccggcgccttcacctctagcgtacccatgggcgtcatcatcgaaggacttgcaagatccatcagacgagatggccccggctttgtcgaggacgcgggtcagtcccggtccacagagggcattgacgcctccaacaatagccacctttgattcccccaaccggatggcctgaacaccatgatggatggcgacgagggacgaggcacaggccgcatccacggcactgctgggtcccatcaggttgaggtgataagaaatgcgattgggcacgccacaatacgcggtgcctatgcccatccaggcctcgacattcggcagatcctccagcactagcttggagtagtcgtccgagttcacaccccagaagaccgccgtgtcgctcccagacaggctcttggcaggaatgccggcatcctcaagtgcttccgaggccacctctagcgagactcgctgttggggatccatctgctcggcctccttaggggagatgccgaagaactgacagtcaaagtcctcgaggcgatccaagaaataaccacgcgatgtcgtcttcttgagctcttttgcatttcgtggatcccggcgatagtaaggctcccagcgcatcggtgggatctcactcactgcacttttctgactgaggagcgattgccagagaagctcggggctgtggttgcctcccgctacacggcagcccattcccaccacggccacgtcggtggagaattcctattcactgtcagtccgaggtacgcttgggcagaaatgacaacgttgggaggggccacatacatattcactgtattcagtcttaggggtttcagctggtgctggggatgttttcccagagggatatgtagaaggtgaaacagaattcatgtttgtcagtagcagtttggagactcagtctccttagcaaagtcaagcttattcatgaaaatgtctacagctatcggttattgatgtccctttatatcttttgctcaccagtacaacatcaggaaatcctcccatcacccccctccacggcggtttattatcgtctcggaaaagccgatatgcagcatcaacagagatagcggattgtggtctagtttccgaatggggacatctttatcttcaaccattcgtccattcggggatattgtcgtgtttccgccatattgcggccaggtttcgcaagaataaagttcagcgacagataacggggatctatggataggagccaagaattcttttcccgtccgtccgtaagtaatggtaatggcgatcttgagacatcgaggattggcggctgcagactgtcgtacaccaagggccaagcctctgtcagccctaggcctgaaagggatgcatgctgatttttggcccaaaggagtgccgggaacgatttcttcaaaggtactagatgagctatctcaccatttaggaacctcatgagtcctccgtacagatactccggaggaggagaaggtgcatcgttcaaaaactcccaagtgtggatcaggccatttcaacatgcttcaacaggcagcccatggggaactgattgaatgcgatagctagtatatatgcgacggtagagacacacgacgttttctggatattctttaggagaagagattgaatactcgtggttcttctgtaaaatccgattttcaccagttggtcaacattcgcaagcataatggctccatttgttccctaccactactcggccggccagtcgactattgttaagtgtgtaactagctccctttaccggtcttttgatcgctgacatagccagatttggtggtcttctcaccaccgagttcctcgaacctccaccaggtcgttgttttctcttccgtcagacataccgccacaccattgaaggctcgatcccagaaaatctgcgcaagctcatcaatagcgccgatcgaccaaagggtccgcctccgcatttccaccaattccaaaccgagtacttccgtgtcggacagggagtgctcgggattgcagtggacggggtcgtccgccgcatcactccagaagatggcgaaatctcggtcaaggcgggcagtgtgcataactttttcatccatccggattctcccgagagcatgacggtctacctgagtgcgtcagactccgggaacgactaccagctcgatcgggtcttcttcgaaaactggtacggctattggcacgatgcgttgttgcacgacggagggatcgactggatccagttcctcgcggtaatgatctatcccccgcacaaaatcttccttatcatcggctgacatagtagtagattcaagacggcggggatgcctacacacccgctcctgcatgggtgccctttcgccggcaggttggatactggacctgtgtaatcatcggccgctggattggcggactcctagggtataagccattcttccgagaatataccacggattgggactttgctgtcgccaagatgaagggttcgttctttcagcggcatctggtgcatgctgcattcgaggaggagaaatcctggacgaagcaggtagagctggaacccaaggctaagcctgaaaacgctgagtttgagcagtggacggaggatatgtctcccacctcattgaccctgggcgcagttgcgtatgagcaggtgcttttcaacggcgtacagcccgggtcagcgaatgagtctaatggtaactccacaggggtcgagagcaatttggagcagtcaggttcttggacgcagcgacggacagtggtggacaatgcgggaaagtagagatatatcacccgaaacctgctagtccatgagtcccagttcgtttgaattcaattgttatttttactccttgcttcctgtttcctgcttcctgcgtcggtcgagtacgatatgagatgatgattgattgtctagactgagatatgttcagatgatctggacggcggggaaaattcatgatctcacgtggctggcgtgtcacttgctatagaacactacgtctcttatacaccctattcaaaataatcctgcttcccataaattcctctttctacgtggactattaaacatagatcggttggttgtcgtacaccagggctagcaggatttcaaaacctcctctcagaggttgtagcacacgtttgacggccaactgtccattgaggcaagtttcccatagtatttcgaggagaattacaaaaacatctttgataatagttaggcagacaggacaggatatacgtggagacaatgtatcttgctgtgagagctctatacgagcagactccgattctcctttaggaaccctaaactgtcgcccacctagctgagtcccaatctcaaaataggtttatccacgtttatgaggacataagtatagagaatctgccctgaggactactttccggcatcaacactatggatctcctacagctcgcaccaacgcaccttctggcgatactgctcagtagtacgggcgcattcgtccttgtcacatacctcctccgtgcaggacatcgacccccagagctcccgaacggtatggtattgcaaaggataaggtaggaattcaaatctaacagatgcacagggcctccaactgttcctctttttggaaacgaactgcaagtgccaaagtcggatgcacattttcagtaaaggacaactctctgtgatgtagggggttaacatgctaagtacttcacataggttttctcagtgggctaaggaatatggcggtttcttcacgctgaagcgatacaacaacaccaccatcgtcatcagcgatcagaaactgatcaagacactactggacaagaagagcaacatatattcccatcgaccagcatcattggtatctcacctgatcacgcagagcgaccatctcctggtcatgcagtacggggagagatggcgcatgttacgtaaaaccatccatcaatacttcatggagccccgttgcgagcgcgagcactggaaagtccaagaggcggaggccaaacagatgctgcatgactatctgatcatgccagaggatcacatgctgcatccaaagcgttacagtaacagtatcaccaactcacttgtctttgggattcgcaccaaaactgtccacgatgagtacatgaagaagcttttctatctaatggacaaatggtctttagtgcaggagctgggcgccaccccacctgtcgactcttttgctctgctgcgctatgtgccgcagtggctgttaggcaactggcggaaccgagcggtcgaagtgggtgatctaatgcagtctctttaccagactgttctagaccaagtgaaagagcgccgccaacggggtgttcagcgcgactcctttatggatcgggttcttgatacactgaaacaaactccgctctccgagaatgaactacggttcctaggaggagttctgatggaaggaggctccgatacttcttcctcgcttatattgaccattatccaggccatgactaagtatccagaagtgcaggcaaggtatgctgaccgcgccaagttttttatccaatgggaaagctcatagggtggtattgcagggcccatgcagaaatcgactctattatcggctatgaacgctccccggcttggtctgaccggtccaagttgccctacatcaacatgattatcaaagaatcccaccgctggcgtcctgttagccccttgggggttacccatgccgttgcggaaggtttgttgaaaccggtatcttctctctcaaaataacaagagattggctaacaaatctcctcagacgaccacgtcgatgggaaactcatcccgcaaggatcgagcatcgttctcaacgtctggggcatgcatcatgacagtgagcgatggcaggaacctgagcatttccagcctgaacgcttcgccgatttcccagccttagcctcggcctacgcagcgtccgaacggcgagaccacttcggttacggggcgggccgacgcatctgcccgggcatccacttggcggaacgaaacttgataatcggcgttgccaagctgctctgggcctttgagttcctcgagccacccggcagcgacagtgacatttcggctcactccggcgctagtaagggattccttcattgccccaaggactatggatgtgccatccgtctccgttctccggagaagcgagggaccattatgcgggagtttgccgaggcacaagaggtatttgctcgatttgattagattagagcatacgctctaatatgacgattaccccctcctctactccatcgggcattgttatgcgagctgtcagcgcggcatcaaaaccttattttcctgcagatcatccgtgtaatcaatgcagtatgttccgatgtggatacattcgagtcaatcaaagcccacaattggtatcgcctactttttcctgacattatcttacttctttgcttctaacggcataggattttaagtttatagcaccggggaagcggcgaggcaagtaaactaaatctattcgtgcattttagtattaccacatggctactacatcgtacctagaataggcaatttgactcctgtacatcgatgcacgtcgcattgtagaggcataatagcatcactgtataacggcaactccgtttctgcagctcatgcatgtcgctgcaaggagcaccagaaggaccttctccgattccccacagattggaactaatttttgagataaggtgagtgctctagcacgccttaggcttggttggggttcacggagtgtctggataggacttgggttggattatcgtgaagaattcctctagcgctcgttggtagtgctataggactcgctatcgggactcacgctaggggttactttaatttactttgatttatttaccaatttattgtattgctacctagctaactacgcctcttccgcttgaaaatatttcttcactatcactatccatgtctataaaatctgtgattatatgccgcttatagtttagtactagtctattttataccatatacatggcgatcccacgtgtatctatctttccaatataggacgaagcttttccattagtacttagtaaatctgaccaaaactgaatgcccgtaagatctctcacctataaaatgatagaatgaattccctacaaggccattccaaccttggaaggctacctaatgtctattgtcttatctatccgacttcggccaatagaacaatcacgctcgcctattcttccaacaaagggatgtggcaattcagccaatgtccacgacaatagctgacgacatgacacactagtgggatttgtgggtgtttcgccagcatattgctcttttctagtctttattctgctcttcgttttttttcatgtctcatcctgtgcagggaagcccataatctacaacccctgtatttgcgcgaggcttcgatatgcaaacctcaggcatccaatcccaacacaactcatttgtgtcttcgatctacctttcggcccctccaccccctcccatctagtcttgagtagtctggagggaaattgcttttaaggttccgaccgccatttggagtcgaatgaatctggtctgaatgaatatctgaattttgctgtcctccactccaccgctccgtcatgtactccactttctccgccaacttcgacaccacgatcgacgcctcccgtgagaaatcagccacgcctatcacagctccacgaccaaagcgcaatcaggttgctcgggcctgtgactggtgtcggctcaatcgtgtcagatgcgatgacaagcagccatgtcacaactgcctgaatcgaggaggttcttgcagcaacacaaagccacaggaggccacctcgctcccagctgcaaatcggtaggaatcagatatctatctccctcatgatcacatggggatgggagtaaatggtttgctgattcacatcgacagagagttgcaacggctacgaactgaggtcaaggaccttcaagatcaaatcgcgaaactcaaagatggagcggaaatccaagcacagacgggtttcgcgacgcccccactatcggatgctgcccacacttcgttcgactttgcggagctcagcaataccacagaaggatggcaaggtctgcagcagacgggacagattcactacgggcccttgtcatcctcatattttgtctctcgaatcactcgctatctctcacaagccctaaaccagccattggaagatgcgaagttagaggcatgcatggcccgttttaattatgttaccccgacccatcaaccctctcgatgggatgcaagccccaacagtcaggcggatcagcctccagatggaaacgaggaggccgagggtctgacccggtcacaagaggaacactttatcaatctactctggcagtcttttcattgtgtctatcctatcctcgatgaacgcgagtttcagcaacattatgactcactatggtctaattccacagatggaatgtctacccggaagccatccgccttggtcgatgtgctattagcggtctgtatgcagtacagcagcaccttctttatcaatggagacaaccagcagtcagattcggagtctgaatggcagaccaaaaacgcgaatctagccagtcggacttactaccaaagggcccagaggcttctgcagagtgagctcgaaaatccaaccatcatggtcgtgcagagtcacatttattcgattgtctacttgtacaacacctccctgctgaatacggcacacattaacctgggtgccacgctacgaatcgcccatgcgctgcggctgcatatccgcccgctggacgggacctcccccgagcagcaggagctacagcgccggatttggtggacactctatcggatcgacagccagctctcgatggccctgggtcggcccccactcattcagttgtcccatgtcagctgcgggctaccaggggatgatcgggagcatgcccggctgtctggcacagtcctcctcacgaataatgaggatatcagctggctcagcttccatgtccagtgcacaaagctcatatatcttgttcagggtgtgcagacagcgttacaccggaaatgttcccagttgctgagcgggaataaggttaaggatctatatgacgacccgcgcctcctcgagagcttggcagagtttctcggaggggagatgacagccattcataactgggttcaaaacgtgccgcagtccctatgtaatgctcgcaagggggcgggggacccattctccaccaatcgggacgcgttgaatctgtctccgtatagcccactttggctgcaatgccaacgtctcctgctggagctccactatcaccatcttgtgatctcgacactgcgtcccttcatgcgattccctcccgtgagctcctccgtgaccccacggaccgacgtttacaatatctcctgtctgaatcacgctatggcaattaccagtatcctcaaccaagtgctatccgagacagatctcctgcgcgggtggtcgcccatcttccagtaccagtgggatgctatcctgtgtaccctgggatttgtgctcgccaatcccgtctgtcccccaaccccttctgcccgcaagtcattgcagacggcgattcgcacgctggacctcgtgagtgatcactttttggcagccaaaaacgcggcgcaggtcgtccgccaagtcagttgccaggcggatcgactcatcaataatgtccaacaaggtctaactcggcgacaagtaccgcgtacgagccagcccttgtccaccagggcgcagaatcccaggccgccgtcgaatcagaactcgttcgtcgcatccgggcaaccgggggtccggtccaactccctaaagcgggcgctgccaccgaccaccctggaaatgtcgtcctaccagccaatgcccaactttgaagcgcgcatgcacctaacggagatgatgccgattggttcattacccgagctatctccttctttggggacgacggagtctctctcgatgccctcggccacctctgctgacatggtcaccggtactgaagcccagtggctgcatgcgagtgcgatgatcatggattcctggactaccaatacatgattaaccgtgtgcttttttcactattccttttttgccttactgcatttacattttgtccgacttagagtaccataatccatagttgctaaccaagcagcgggttctgctagaggggagaagtagaaaagatacaaacaaactggataaataacttatttatagtacatatgtactgaattatgtgttggagcaaggattaggatataactaatcatattatcatcttacgttgtgaaaattataggaaaattttcgtagactcttctagataccagtagcaagttttagacacaagattaggaatattcacacttccttatccttgtctttcttttcttaacagagacataggggaggacaattcgtatattaaggggattggtatagaacccccggccggaggtacaccttcctaatcgggtaacgctagagatcacatgatccatcacagtctcgttactattcctagacgtcttttttatcaattatacgaagaaatcagggtgacgaagatatatcaacagtgtagaactaggtacagtataaacctacgatatatctgatttctcaagagccaaaatgacagatcaggtgatatcttgtcgtgtcaatctagcctggtgacctggcacagacgaccaccagcctcgacttgccagttctcactgccaatagccgtcggcacatagaaagtttggaacgaatcatatttttttcttgatcgcgtacagcgaattatagttgtgaccgtaaaaggtctgcttccaatccggctgctggggatccgcctgtccgcatggtaagccagtggtctcaaatcgtgaatgtctgtcgtcttgcctcgctcatatagcatcccgaatctggactcaaggccgtgaggatcggcacccatttggttgtcatccggtctgccagggttttcatcttggtgagattcgcaccggtgggccagtctctggatgatgtgtgtgtcaggaagcatatcgaaacaaaaaagttccacggcatgtcagataaagagaacgtacgtagataagatgacggtaattgctgctgtgcgccacgcaggcagaactgaattccagacattgccagtcacagatgacgagacattcagaccaatacccacgaacgtgacaccatccacggtgattctctgtatggcattcgtgagttgcgagttattgtgctgaatgaggtcgagcggaagaagacggccgccatattgcgcgttttgcactagttgcatcaggtcgggctcgatcagttttgtataatgctggaaatacgatggtgactcggtgatgttcatggtataggaaatgtccagtttgtgcagttcttgcagaaagagcgccaacagtctcttggcctctactgcggtatacacagggagtgtcagcggggtgagcagaaacgttgagtgtgtgatttgtgcaatcgccatcccaccagatgcggtgtatgtgggtaggtggcgatggtagtgtcctacagcttcaaagaaactgtgcgacgaggggttcttgttctcaaattggataacgacgcctgtgacggggaagtcgggaaacgccttgacggtcatggagtacacgaccccatatgtccctccgccacctccgctaagtgcccagtacagatctgggttctgggtaggcgatgcggtcagaaatcggcccattccatcgacaacctcccattccaagacttggtcggcactaagaccgtactgagagctcagggccgagtggccccctccttgcgtgaaccccccggctgggcctacagtggaacattccccggccactatcaccagcccttttagataggcagccttgttgatgtccgtgccttgaacgcccgcagccatccgcatcgctggcccggtatagtgtgcgttggtatagttcaggaaatcaatgtccttgagataatgggtccagatggatagtgcgcctgcaccagtcgacttccctaaataactaggatgcatgattagcgagagcatggcattgttactggatgatgcatactcatggcctgtgttgcgaatgacgagacgaatgtttctttcctgggaaaatcgaatggtctgaatgaagtcgtctggggagctagcattgacagcatacaagaccatcgcacctagcgtgcacggcttcgatcggggggtaaaggcatcgcaggtttcattggccacggtggctgccatgatggaagaggaggataaatcgctatttgatgcggttgattcaacaggccggcgatggggctcgtcggatgcattggattacttactggagctctggcttggtccactgctgtctcagagagcgacactcattggcgatatagagggggtcatgacaaggctgtcctagtggttgcgtgttcactaaccatccgccaatgaatgtgttgaaccgcgaccagtcgtctgaggacggccaacatgtatcaccgggcatgcatcggcaattcgaagacaatccagtcgaaggttgtaggattgatatgatacaaaataggacaaggtattggcagctgtgaagacgcattgtgaagcgagctgttaagtaaatccaatttcgatatgcccgctagggaaaaacaattcttgggtttaagaacatataccattgatctcgctctaggttctcgaatctaaaactgggtgccaacatgaattccgccgtcgaccaacatattcgtgccagatacgaagctggccagcggactcgccaggaacactgccacggccgccacctctttcggcccacccaaccgcttcagaggaattttcagccgctgttcctccacccattccgggttgatctttgaatacaactcccagggaccacccttgcacagaatcggtcccggcgagatggcattcacccgaatgctcttcggtcctaaaaagtgggacaattcctggacatgctgcagctgcgctgccttgcagggcccataggctgcagggggtgaccggtagaattcacgccccatgaaggagctctgcacgatgatggatgcctggggagacttttccaagtagggagtggccaccttgaccagctcgacgaaacccatgacatcgatcgcaaaactgctctcccagtgctctgtctcaccttccatatgcatcggcgatgctacagccagtcagtttgcattctaactagggagtgccgggaaatcaatcaccattggcgataatcacgtcaattcgaccaagtcgctgggcggagctctcgacccactggacgagggcatttttgctagcaacatcgaatgccgttcccacggcgcgggcgctatttccctcggggagcgtaggatagaagtcatcatactcagtattggtgacggtccgggcgcagtaggatacattggcctcctcctccaggaatttatgcaccattgcctctcccataccccgcgtgcctcctagtccacgttagtcagagctaagttgatagatttctctcttacttacctgtgataagcacatgggcacctttgagaccagtaatgagcaccataatgacaataactttcgaaatatttgattggaatgtgaataggaacgtgtaggaagataaaacaaagagacctgaaaacggcgaaataggttggaaataatcattggctctcagactatacgttagcctcctcaagtaacaagttggccaaaattacccgatttggacagtccccaactccgagactcctttgggaagtcaacatatatttggactagacagcgaaaggaggaacatgagatgggctattgtttccaatcccttttgagcccatcagtctccgccttttctagtcggcaatatgattctctgttgaaggagttttgatagtcttacagcgctttccatcttcatcatggtagaaaatcatcattcgtctttagaggaggcaaatacacccgtccagtccgatggtgatgtgcagaaatccgagttggctgaaattgatggaccatcgtcgaaatcttcacggattgcagcaggggaatcgattgcagacagcgttcgcaacttccttgaaatacgccaaggtggcattcccggtgacactggagtggtctttcacaagatctcagccattggaagcggaaccggagtgagtacatctaatccaaccgaaagaatcaggattgacgcttgatagtcacaagatgcacccaccgtctcatcggcagccgagtcggcttttgggctgttgagtcctctacaaaatcgacaaaggaaacagtattctcgacccattctcagcggattctcaggcacgatcgaccccggagaaatgttgttggtactaggtaaacccgggagcgggtgtacaactttcctgaagaccctgtcgggcctgtgggatgaatataaggaaatccagggtgaactcactgtggatggtcacccactgctagatgtgatggcacagcgaccacaggatattctcttctgcggttagtcatcgtttgatgtttgtcgttttgaacacacactgaccgacatgtcttccttagccgagtctgatgaccattttcccacgttgactgtggcggagaccctacgctttgcgaccagagcacgatgcggccccgaagtctcggccactaaaattgacacgatggttgctcagctagccaagctagttggtcttgaaaccgtcttgaatacgaaagtgggagatgcgaagatacgaggagtcagcggcggagagcgacggcgagtgtctttggcggaggccctggccacttgtgcccagtaagtgatatcttctgctcattcaagtaccaaactagcgattcctcgactcacacatccttacagtctgatttgcctggataatccaacacaaggactggactcatccactgcggtcgaattcatggaaatgatgcgtgagtggacgacacaaagtcgatgtgtggccgcgatgagcgtctaccaagccagtgatgcaattgtctcctattttgacaaagtcctggtgatcaactctggccgtcagatcttctatggccgtgtacaggaagcgaaggcatattttgaagatctcgggtttgagtgtttatcgaccaccaccgtcgctgacttccttaatgtgatgtccgctgatccagacgtgcgacgagcccaagaaggcagggagaaccaggtcccacgaacggcggaggagtttgagcgtgctttcagtgcgagtcctatctaccaggaaatgcaagtgtcggtacaagtggccaaggagcgttcccaagcccatcccagtccccttgtcaaaacatcggcctttgctctccccatctggcatcagatttggtactgtgccagtcgccaatttcgcatcgtcaccagtgattatagcttgtgggcggtggagctcgccacaatcgtcgttcaaagtctggtgttgggcacgctgttccgaaatcagcagcgaacgaccaattcattgttcattttcgcgtcttctttattctactctgtcttagtcccggcactgcagtccatggctgaatttggcaatggattcgctcagcgaccgctcatcctgaagcagaagcgataccagatctctcgcccgattgcatacgctctcggcttggtcaccacggatgttgtgtggaaggtggcagcgatctgttacaatatccccctgtacttcctgaccggatttcagcggacgcccggaaatttcttcacctggtttctgattatctaccttgagcatctcgccctgtctatgttctttcgctcggtggccatattttctcccaacatgcatcgggctgtgctgccggtggggattttctttaatatgtatgtcctctatacggggctttacgttcctgcaccacagatgcaggtatggcttgggtggctgcgatatctaaatgtcagtgggtatcatattatggggtttggacaaatgctaacatgtgacagcccttgtattatgcattcgagtccgttatggtgaatgaattcggagatctgagctatcagtgcagtatctcggatctggtcccatcagggccaggatataccgatatagcccaccaggtctgtaccgtggtgggatctcaacccggggatcgtcttctgtccggggattcgtacatccacgcccagtatggattcaaaacctcccacctctggcggaatgtagggattaacgcggccctattcgttttctttgccctttgttcagggtaagttatcagacgctcaagcctagttcatgagaaaaatctacgactgacactgggatttaacaggatcgggatggagatgctcagaacacccgcaggtcaactagccacagttttctacaagagcagctcacgaggaattcaccgccgcgataaaatcgataatgaaacaggatcagtccacggaaacgacattttggacgcatcggctggccaaggcaacgacgcaaatcggtcacaagcaagtcagagtaacgccctttcatggaccagtctctgtcttgacatcaaaaccagagatggcgatcagcgtctgcttaacaatctgagtggctcgatcaagagtggacaactcaaggctctaatgggggtctcgggtgccgggaagacaaccctgctgaacgcactggctggtcgttccaccattgggactctcacaggaactctggcgctcaatagtcaattgcttcccacgttcttccgaagtcgaatgggctacgtgcaacagcaggacattcatcttcctactcagacagtgcgcgaagcattgcaaatgacggcgcgacttcgacgcccagagtccatccctctggtggaaaaaaatgcctacgttgaaaaggtgattgagtggttgaatatggagcacattgcggatgccctagttggtgtccccggggccggcctcaatctcgaacaacggaagaaagtcagtattggcgtggagatggcatccaaaccagaaatcctattcctggatgaaccgacctcgggtctcgatggccaatccgcgatgctgatcgctcgcttgcttcgtcgtctggcagactcgggacaggccatcctgtgcacgatccatcaaccggcagcagagctcatcgaccagtttgacaagttgtatctgctgagccgcggagggaacttggtctatgatggtcctcttggaactcgctgccacgaggcaatcgagtatttccagtctcggagtcgcccctacggctcagaagagaacccggcagaatatttcctggaggttattggggctgggtctcgaaacgacgcccatatggattgggctagtctctggcatgacagccagcagggcaaggagcgagagaaggcagaacaaagtctggtccctgccgcagaacactccccaccgctggagcaacagtccctgtattcggtgccgttccatgtccagctgtgggtggtggttcagcgaacatggctttattattggagagaaccagattatgtcacatcgaagctctggatgagcgtcggaaactccctcctcaactccctcacctacttacagtctcccaacacagagcgaggggcatataatcgggtcttctctgctttcatgtctctcatcgtgggcccccctctagggcttcaggtgcaaccacgcttcgtgaccctgcgggatattttcgtccaccgagagcgagagagcttgacctatcactggctagcatttgtcttatctgcattcatcgtggaactacccttcacatttctcagctcgctagtctattggttgttgtggtacttccccgttggctatttctacgccccctcgcgcgcagggtacagttttctcatgtatgaactctttggagtctttgctactagcctagcccagctgtgcgcatcgctgatgcccaacatcgaggcagcctttgccgccaacggattcttcttcatgttttgtaacacctttgcggggacgctttctccaaagccagtgacaccctcgggttggcgctggttttacaatatctctcccctcttctatttgggcgagggtgtcaccgtggacgtgctacaagatttacccatccgatgcgagcagtcggaggtttcaatcttctacgcggcgaatggcacgacctgtggtcagtatgccaaggatttcctggaaattgctacgggatatttggttaatcccaccagcacggcggagtgtcaatattgccggtatcgcgacggacaatcatacgtaagtcctagtcaggagagagcaaggaaatggatctggtcttgaaactaatcatcagtagtaccaacaatacggctatgagtttgctcatcggcatcggaacattggcgttttcatcgggtttatcgcgttcaatttcacgatggttctggtgatgacctatcttaccaaaacacgccgccagtgatggaggatagattttggtctgctatggccacagtctcgaggaggggcatttgagttggggcaggttttcttgtttggcagtagaaaagtagaatagaaaagagaaatctaatttggatgagctgtttctcttcgaatcctttgcgtagcccactgctcggagtgtcatgttcttaattgtattaaactccaccttcctgctaacgtatatgattgacgtccaccacagctccgacttctcgatgatctttcttgatatagtcctttctccgtgcacaactgaattgggaaactaaattatacctgcacgaggaggcgcggcattactaccgcgacgagctagcttccttggccaatctagttttggaagttcaaccccgacttccccatggagtaagtcacaacggcatctcatatcaaggagccttggctacccagaccctaaccattgtggatcggcagatggcggggactggcttatgtgtatttagacaactatttcttcaggcaagttaaggttgtgagaatcttattctaactgatcggaaacccaatttttcctcactttgtatcattgcctttatttgacaatccaatccagcacaagatgaagctgtcagccgaggcaacggttatatctagagaagagggagctcagttgagctacgaagcctcatcctctcatcccagaaacatcaaagagcaagatttacagcctatccggcagattggcagtccagtaaggtgccctatcttcacactcgggattaaaacatcctctaactctccatggcttgctactagactgcgctgtgtatgggcgcattcgcaattgccttcacaactctatcgatgagtctaatggagtggcgaagtagagctattaccaatgcctatattggtaactgctttttcacagcgggcttgggcttggtgctagtggcccagtgggagttcgtgcgcgggaattcctttggccatacggtctttggagggtttggtgagcatatcgttccatcattctgccgtctttcgtgtatcacgaccgatatctgattaacgtcgctcccttttccaggcttgttcaacttggctttgggggcaatcaatgcaccggcttttagggtggcggatgcctttgaagacgttcccgccgcgttgaataatgcaatttgatatttcatgctaggtcagtcaccttcctgtgggcggccctttcttttccttttcttttttttttagctggggtttaggctaatatgaagatatagtgtgggggatattcgttctattctttactgttgctgcaatgcctatgtcagtcgatgcacatatatatacagatacccagtctaaaaggtagtcgcagctaaccagagataggaacctggtatacacgggcatgctctgaacatcccaaacctcatacaccctgttggctgcatcgtactcctcgttggccgacgatcatgcatctactggagtcactctgaagaagactgcgggttcattcagatttgtctcgggcttgtttgcctggtacacggtcggccatctgatgtgtcaagacgcactgctattctcttttcccttgggggatacgagccccttgtatatgcgattgcggagacagagaaaaagctaggtgttaaattattaaggcgaagtggtcagatgatctagaaggcctgctgagtgtacgggaaatgagtgaactttaggggtgtcggtattgattcctctttacgaaagtgattatgagattcaatagaagctacctcgttgtggaatacattatcaggatataactcaactgcgtaagccaaatcaaactatttgcatgccggagattctgctatacggaagaagcaatcagggctatcgttgaaacaaccctaactccatgtgattaatgagagttaactgagtgtgaccaatcaaaagctcattatttatggaccaatcaagatgcattcgtatcattgcggagcgaagcaataaatcatgaaaccaattagccagtaacaggggggctttgtgcagcactagaagctagaatcagtcacttcgctctgcaacgattatctcgaatcacctcgtagatgtatttgtcttgggccccgtcgtggaactctataatagcctttttagaaattaagcttaacgagactacctataaatgagcacttgatgtatttacgtatctatatgacgctttgaccatctagggaccacctcattgtataccgtgttcacatggtgaattctccaagcttttggaagatttttgcctcatgagggtcgaatttcttggtcgagtgggcgtacatactcctgaccttcttcaagggatttctcgtctccttgggtgcttggatgttgacatccacgccgtaagttctatcacagtcgtagtgacagattaaccatggaaaattatacaacaaaagtactatacaaccattccaaggaccttctagggctgggagcttggaaatattctgattagaaattccagagtggatccatggatgccggcccagatggacccacttattaccctttttaggcacgccatctccgtcaaatgattaggtgagctcgggaattcccgaagtcccactcggattccaaaaggagattcggagtttgtcagtcaaatggtaacctgtgattggtcagataccaaactgacaaagatgaatgtcccaaaggagtaatctattgtcaccaaaatgtcctcttccagcactgctcgcatttaaataactagctagggtcaggcaatatggatattgatacgtacgtcaacctcctccactggatatctatattcctaccttccattttcagcttagtacgactccattgggtagtggtacctggataactagctcgactttcaaacggctgactaagtggcactcgcttttcaccatgagtgtagacaatccgacgccgagtgatagcgtgctcgaaagtcaaaccccagatcgtgtggacgaatcaatcatcaaagctgcggatgccgagaaggacgcagccccacgccgagaaattgtaggcctccgctggctgctcgtctgcattgctgttttctcagccaatctgctctatggtttggacaataccatcgtggcagacatccagggtcccattgcgggtgactttgatgaatacacgcggctgggctggctcggggtgggcttcactttgggatcggtggttttcattctcccactgggaaaagcttacgccatcttcgacacgaaatggctctttctcggttgtttgactatgtttgcggccggtagtgccctctgcggtgctgcccccagtatgaatgccatcattgtcgggcgtgtgtgggcgggagccggaggagcgggcatgtatctggggtaagttgtaccacgacgggcagagtgcagagagagaagactaaccatgacaacctaggaatctgaatctgattactatcctgaccacccctacggagcagcctgtgtatgtgggtctggttggattgatctacggcaccggctgtattctgggtcccatcattggcggtgctttttccgatagttcagctacttggcgatgggtacgtgtggtctctttctagtttcctcagcgagtgtgctaaccgtaatgaatagtcattttatctcaatctggtcattttcggagtcatgtcgcccatctatgttttcctcttgccttccttgccacgtccagcgggcgaaggccgcagcttcatcaagaagcttgtggagctggactgggtgggaactctcctgtccgcgggcatgcacatctccattatcttgttcatcgtatttggtggtgtcgaatggtcctggacggatgggcggaatatcgcgctgtacgtggtctccgctgtctgcactattgccttcgtgctcagccagtactattgtgtggggaccgacaaacaaaaccgactgttcccctgcgagttcttgcggaaccctacaatgctcctcctttacgtcataatggcctgtggcggtgcctcgctcttcgtggcggtttactatatcccactttacttccagttcatccagggtgactccggcatcatgtccgcggtgcggctgttgccgttcgtctgcttctacgtggctacaattctgctttgtggttgggtcatgcccaagactggcttcttcatcctctggtacctggtcagcggcatctttattctcattggagccgtgttgatgtacactgtgaaattgggtaccagtccctccagcatctacgggtactctatcctgatggggttgggcatgaccaccacgcaggccgcctatgcggttggaccgaccattgtgagccccgatcgggtggccgagtgcctccagttcatgaacatcggccagggccagagtcaactgttgggattggctattgcaagtgccattttccagagtaagaccctcaccgggcttactaccctcttgggaaacaaaggatattcacatgcggacatccagggtgcggttgctggcgctcagagtaccctgatggagcggctgccccaggccttgaagacagaagctctggaagtgattgtgaattcgattagtgatgtctacgtgatggcgatttcggcgggggctctctacgtggttgcatcatgtctgttgcctcgccgtcggttctagaatctttcgcaaggagggagagcagcgagtgttgacgggatactggctttgtatctgtgattggggtgtcttagataatggagttttattttctcattcatttcctcgagcgcgaggtaagcctctaggagtgtcctccgctcttctagtttctagatcatcataatatagagcttgtgggttgaaaatctctcctggaaatagactagaatatagcagataagaagcttccgcgactcggatacagcagacaaagccttcttctagtcgataagtgttgcaagtcatctccatttgtcattgggacatagcaatttaccaatatagtagtctccggaactccgactccgcatcccacctagtactagtagagagataaaagacatatccggccttggccaagtaacttgcctccttcagctgtggtgaccctgtaattgaacttgcgcagtggtaattatatcatctatctcatcttctagaattggcgttgatatagtagtatagcatgaaggttttcgaacagccctctaaaaattgtccgcactgtagctatacgaaaatccttctgtattcattgtagaagatatatctattttagtacgtaaagtactggtggtgagcatgaaattaccctatctgcttcgagagtcaagaagccgatgattggccgtatgtaccttttatatgtaaatccctaagaaaaggtacaattacccaccaagcattacggcgtggtgaccttacccccctttagccggggcctatatatatctagtctttctcttcccatgccatcttctctgatgttgtagaaaataaagtcttatttcacacagctatctattattcagtcaaagtacacgccatggccaccactcttcccagcacctacaagcaagcaagcttcaaggaaaaagatgccagactgactctagaacaagtcccattgactctgcccaaacgtaacgagattctgatcaaagtgcaagcctgtggcgtgtgtcattcggaccactttgccgagacgaatctcatgggaggaggattgtgagctatcccactatggaatccatggaattccgactaatttccggttcttttatagtcctatcgttcccggccatgagatcattgggcgcgtagctgcaattggagcggacgagaccatctggaaggtaggggatcggattgggggcacatggcatggcgggcacgatggtatgtatctctattatctccccaaaaagcctggttcccctaataagactatactaatgcactgaataggtacctgtgcggcatgcaaaagaggttactttcagatgtgcgatcatcaggaaatcaacgggatttcacgaaatggcggctgtatatcccctttctcttttcatcatcactctttcgtcattccaacggaataatattaagctcacactccggtagatggcgaatattgcatcatccgtcgcgaagctgccgtccgaatttccgacgaggtcaacgctgcccaatacgcgctcctgctctgtgctggcgtaagtgtcttcaattcgatgcgccacatgagcatcccaccgggtgggctggtcgcaatccagggtctgggcgggctcggccatctagcgatccagtttgcgaacaaacttagctatcgcgttgtggcactctcgcgggattccaagaaagaggaactcgtgcggaagttgggcgcgcatgagtatattgacacgagtcgggaggatgctgtcgccgcattgcagagaatgggcggcgcttccctgattttgtctacggcgcctgtgccggagataattaacccgctgatcgaagggcttggtgtgatggggaggttgttgattatgtccagtaagcttctttaaggccgtttcaaggcgtttggttggatgctgataaatatagttgttcctggtattgaggtcagcactggcatgttggtgagtgagattttcctctgcttctctgaaaaccagacagaaagagaaaacagaagagatgcgatcaagatattaaccccagtttaggtcggaaagggtaaatccatctggagttggcctagcggccatgccatcgactgtgaggacgccatcgcatttgcggaggtacatgacatccactgtatggtagaagagttccccttagaacggtgcaacgaggcatttggtatgatatctccttcacttcttgggttcattttctctgacctgttgtccttcctacagaggctatgatggagggaaaggtgcggttccgcgccgttctcaccatggagtaatgagtctgaggacatattgaggggctaccaagtgcaccaagcagcgagaagagggagagagagtttaaattcctatccagggcagggcccggctcagtctgcactgggggtgtggtacccaagttgcggcctaaaggctcaatttccaacaggatattagggatgatttccattatacttgccagatagtatttacgaaaggcagagtatgaaagttgcgataaattgagtgtttgagtatttacttctccttcgcgctatgttccacgtaatattcttcatcttccctcgtagtcgccccttaacagttgcctaaaatgtcgcacgcgatcttctctgccagtgcatctacttagggttagagattttgtttgaagactatatactatatattataggacagaggcttacaaattgtggattggggatctggtggtaggaacggcaaggccgaggcatccactactcgcagggcgtcaacgccaatgactcgagctttggagtctaccactgcctgagtatcatttgccaaacccatagcgcatgtacaggaggcgtggaagatggtgtccaagctcctccggacatgatccagaatttgcttatccgtagtagcaccaaagtgttttattccaatccgcagggcggtatcgccaatgcctagttgagatccagcactatgaaggacacagtgtcggtggacgatcatcatccccaaggagtttggagtttcgggatatttcctttttcggaaggacccagataggagaatacgcgccgatgaatcaatttcaccctttggcaagacgcacatgcacgtgcatattctataagtatactgtgcagacatcctgttaattgtatatccgttatactcctcgctctcggtctctcccggagtcttccgcaatccctgcaggccttacgtagtaccgcgttcggaggtcctgcactggtatctaatcagagtagtgtggtcactgtatgcaagggaggaataaacagccagctagtcagtcgaatatagaatgattgctagagatctgtatttgagggggaaaagcccatcaataagcgttggtttgccaaacggatactctggtctctaagtgctactccaataccatccatcatggcgaaaattgatgtgcaccatcatttctatcctctggcaatgcgccaaggtcagtcccacgcatgttagagttagagtgagaagcctattggctaacctcatatagccctggatcgcgcaggaggtgatccctcgggctggtacactcccccctggacgctggagctagaccaagacatggcgcgacgaatgaaggttaccaccaccattctctccgtcactgcaccggggccatgcatcgagcctgattttgttaaaggagccgccctagcgcgcagctgcaatgaatctgcggccgccattagggactctcagccgcacaagtatggcttctttgcctcggtcccctctctgttcgatatggcggcggtcttgaaggaaatcgactacgcctacaccactctccgtaccgacggagtcactctgttcacccgctacggcgatggtcccaattacctgggtcatgtagcctttcggcccatctgggctgatcttagccgtcgcgatgccgtggtcttcatccacccaacccatccggtcgatacgcagctcgtcagtcaatggctaccgcagcccatgtttgactatccacacgaaacgggccgggccgctatggatctgctgactagtggcattttgcaagactatccgggttgcaaaatcatactctcccacgcgggcggaaccttgccgtatttgatctaccgggcggctaccatgctgccgttgatgccacgcactcttggtctttcaactgaagagctggtggcagctgctcggaccttctacttcgacacagccatctcatcaaacccggtcacgttgaaggcgctgttcgagtttgccgcacccggccatgtcctcttcggcagtgacttccctaatgccccgcatgatgcgatccaacgctttacggattttctcgaggcgtatgagctgccggaggagaccaagcaacaggtaaatagcggggcggcattagagttatttccacgattgaagaggatcccggataaagcgagactctgaaatggggtaggatcaatatggtagctgtacataagaagctattggtagggggttggagtcaaggctgatgagacaatgttgccgatgacctaatgattatttacatatcgcgatatgactttagtagtagaagtattggcaatacattatacaaattgcaatcgatggacctatcagtttccggtctgtttgtctctaaataataaactgggactttgttggcgttactcagagcaagcatagcttctctctccgaaaaacttggtaatgttctacctatcatccagattatccaactcggccattttccctcctcgatgaagcggtcgttcttttggggttctatatcaagcatagatgctccccatcagatgggtctggaagagccctctgtaggatatcatatattttcgttttatggtgagcagactgaactcactgtcgactctacaggaagagggaagtgtttccccaaggggaatcttagccggatgacacactcctttgggtaactgggtaactgggtttcttgaggattgcaagaaatctgcctatgcatcaacccctctccttgtcgatctataagtaagcgtacatatagttacccctcatctcgacgaagaaattcaacctgaaggattcagcccggatagatctcatcaactatcaactatggaaccactattgctgctactcctggtcttattaccagccatcgtagtcgtacgatatgccttcacctatggtcatcgtaccagcactatgcccatcggtgagttgtcgtcttcaatgttgactcagtgcggattttgctcatctggcataggtccacccaccctacccttcattggaaacatccaccagatcactaagaagtacactcatatcaagtatgtttgataacctccattttccctttggagcacacagaggagattctcaccgccgatgtcttgcggaattcaggttcaccgaatgggccgctcagtatggagggttatatatgctcaagatcgggaatggcaatatggccgttatcacaaatcgccgactggtcaaagaagtcgtcgatcgcaagagcggtatctacagccatcggcctcattcctttgtcgcgcacgatctcatcaccaaaggcaaccacctattggtcatgcactatggcgaccagtggcgcaccttccggcgactggttcaccaacacctgatggagtccatggtggaaagcaaccacacccagattgtcaacgccgaagccatacaactggtacgagactatatgatcgacccggagcaccatatggcccatcccaagcgatacagtaacagtatcaccaactcgatcggtaagtctcccatctactatttattgctggaagctcctaagtccctgtcacagtattcggaatccgcacggccaaccgggaaggatccaacatggggaggctttacaaactcatggaggaatggtcggaaatgatggaaacgggcgcaacaccaccagtagacctattcccctggttgaaactactaccacagtggttttttaacaactatattacccgggccaaggccatcggcgtgcagatggaaaccctctatgtcgacatcctgaacaaagtgataaaacggcgggaagatggcgacaataagggcactttcatggacaaggttctggatagccaagagaaacataatcttccctggcatcagctggcctttatcggcggtgtcttgatggaaggaggctcggacacaagctccagtctcacactggctatcgtgcaagcattggtccaaaaccccgatgtgcagcgaaaggcacatgctgagattgatgcggtggtcggccacaaccggtcacctgtttgggaagattttgaacaacttccttatatcaacatgatcgtcaaagaaggtcaccggtggaggccaatacttccactttgtttcccgcatgcactgggagagggtaggcctcttttctcttactttctgtccttttctgtcctttctaacttctatactaactatgggtatccttatagatgactgggtcgatggcaaattcctccctaaaggcacaatagtcgttatcaacacctggggtatccacatggatccatttcaacctgatgacccagctgctttcatccccgaacgctttgccaaacatcctcaattggctcccgactatgtgccggggacatgggagcgtcgcgaccactatggctacggggttggacgccggatctgtcctggcattcacctcgctgagcgcaacatgttcctggccattgctaaactgctatgggcgtttgacttccagccgggagagggcccgatggatagtgatccggttaatggataccataatggcttcctttactgtgccaaagactatccttgtcgacctgtagtacgcaacgaggtcattcgggctacgattgaaagagaatttgggattgcgactgcggatgtgttttctcggtttactgagggatagttgaaaattgagaggcgggatggccgcattcaaattatttttggagctgtgatgagcgacgagaatgagttgacgttcttttttctcgttttctgatcatttttgttttcaggtgctctctactatactaggtctataactttcaggcctagattctcacatcatcaacacagtgtttctaggctttcagcaacgtcaatccatttgtaaaaggtccactatatatccgcggcgagcatcccctaccaatatgggaaaggacttccaaaaaaaaaagatttctcggtgcccccttcatgggaactatgatgaattggcttgctacttagatacaaaaattattacactgatacctcatttgagatgccgtcaaactccagcccgtcctcttgatcagtacgttctatcgtcatcagatgctcccaatgctcgggatacttctgactcgcccatttctccacttcatctttccagtattggtacgggatggcgttgtagaataacccgatactaggacagatattagcgatgataacacagatagcaaaggaatttactcacgtattgctggtaggagggatcccgatctcagcttccatgttgtcgatagcttcaacagccaggtcaaattcgcattgagctgccaaggcctccatatacgccgaatagagcgggcgattcgcagtgatctccagtttcttgaccttgctcatcatctttatagcctcctgggtaccattgtgatgattctcacagaccttgaagaaaatcgtgatagtcttgtgacaagggccttcctccgactgaagaatctgtcggaagatttccatgctcttttctggcatctcgcatgcagcatacgccatcatcaaaccatttaggattctcgtgttgagatccacctcaagatcaagctttagcatgttgtgtacaagctttagattggttgcatctgccgtgcgagccaggccctggaaacagcgggcataagtgtctggcctagggcgtcgaccaggttcatcggcctgacgcatatgtccaaataccaagacggcaagatcactgcgcttccggttgaagaaggaggtcatgattttggtgcgagctgagacccacgtttccgggaatgcgatcttcagaagctcgtatgcattccacacgtcggtgtcggactggcttttatccgtaatgtactctgtgagggcgtcccgtaccggcatcttttgttcatcgctgtagctgcctagtcgtggacgtagcaactctgaaacggcgtcgaggtcgtggcgataaaggagcatgtgagtcaatgcggcaatggtcgcagactctaggcgcacgttctcttggaaaagcgggtctaggagggaggatatctggtcgaacaaggcatccttttcttcggatcggcagagcatcgcgatgagcttgtttgcgattggcaggttgtgactcgtgagggaagtcgtgtcaaccttctcttcgagaatcttcaatgtctcatcgacatcgccggcctgtatacaggactccaattctaagatatgagtttgactatctgggacaagaccccattgacctgcgagtcccatgaaatcagaagccaactgcgggttctgcgttgcgttcgcgtactgaataaggttattaacaatgtgaatgttgatggagccctcaagctgcggattcttcgtagtccatgaatggactctttgcgcaagagcagaagcattgttcccctttgctgcttcccagagcaagattatgccaacggtgtcttcgctgggctcattagggagggacttgaagatctcctctgctgaatctgcccgcgaattcaagagataatatttgatgagagcctctctcgcagccatggagggttccgagccatcagcaatcggagagtcgtagacagtttgggccgctttccattgaccgtggtcgacgagaaatgtaactagctctccatgcgaggcttgatcaaatttattgccatggtttccccactcatcaacaatcttccgcacctgtcgcagatcgtccttcatggcaaaccctttcataattgtgagccatggcgacgggacagccttgctcatttgaccccagaacttcaatagggtatgtctagcatcctcgggattaccattcatagccaatatattgatatagagaccaagggccggccggctgatcttccccggaccaaatccatgatcgaggtttagttcttgatatgcatatcgggcaaggttcatgacaacatcacgagcctgtgggacacactctgactcggagagtacatccaacaacttttccaaattctcaatcgagaaaacattctgccagtcttcttcttccatctcgccctgcagggcccttaaatgtttgaaggtgacgatcagcgcgcgggcttggaaatggctgatgagcattggcgtttcaagccgcatggtaaaaaacgtttggaatgccttcgcaagaatatcactcggaggagttctgcttcgatctttgagtgccctcatcaagtcagccattggtttcaggcccttttcggagggcaaaatagattgcgaccgctcagggtccgagctgaagacaaagatgttgcgtcgcgaggtataaggaaggctggacatggcaggtcgtactcgggcaggagtgattgtgtgcaataagcgatttcgatggcattgggagaaccgaagtggttcattgttaatgattgcccggaagacccgtcttgtgagatgggattgcattatggattatgtgagctgagcttatagcccagatagaacaagatgaattggataaaaacgtgtagtccgaagttgactcgcaatctgcatggaatcgtgaaaaatgggggttcgcgacgcggagagatttggaggcggaagaagtcttggcgaaaaagatctcatctccgcgttgcccggtctccctaacaccgtcttcaacatcgacaactaatcagggattgaaaggtcaagatgtctttgaacctcttttcttcaccgtcattgctgcgcaatgtcgcggccacagccaatgttggcctgtcgctctgtcgctggagctcgaccgctgctatgagcgctttcacttctcagcgcgccacaagctcacagagtatgtgatcaacccgatacaccgagcttattcatttttgtccattctataatttgggaacacatttatttttgggtttgcctagcgactaatgtattgcgatagcctcccaaatcgtccaacgacgccgtttacctagtcgtctgaagttcctcgaggaccagaaggcgcaaggcgagagccgagcccttgagagatatcaaacccgtgacttcaaggctggagatatctacgccccgcacgatctcagcccggccgagatgaagaaatggggaaagcgccagtcccctcagacagatgctttcgatgcattgaacgtgaatcctatagatttgtacaaggtatgcattcctcgagccaatggagctatatggaggatataccatcatgaacagccactaactgttcgctcttttgccattacagaacttctccgtcatgtccgaatatatgaccagcatgggccgtatcaagccccgagccattaccggtcttcgacctgtcaaccagcgcaaaattgccaaggcactccggagagccatcggcatgggccttatgcctagtgttcaccgacaccccgaaattctcgcagccgagatgcgagcacgcatggagggccctggaggtttctaagccgaacatactactttggagtcattttttgggatctgaaacaaatattgggagatttccttgtacaagtacaggccggtggctggtagaaagggcacgacttggtgtattattactcttagcgctatgcattgattttattgagagctactactttcaagttcttttgtgctagaatatttgaagctatcagatacattgcagatgtgttgacagtgatatttctcttttctgcatactcccaatgcttgttttaagtagacaaggcgtggcggtgttccccgctattgtggcccgtacgtcagtcgataaacagtggactgtggactctcctctgctttcccccaactcctctgcttgagtgtgtacatcttagcaatgtcacttacaaatggtgagaacctgtcaccctcatattatatattattgtcctgacatattccaagagtccatttgggccgctagcccctccaccacccgcggccagcccactcagctttcttctgatgctaaaggcgagcgattggcatatgcagtatgttattctaacaatatctacaatagtacactgcctcgtcctgacatcagcgattatagtccaacaaatccatcttcctacgttcgatcgatgaccccgcagtcgctaggcagtacaccgaacacaaggcgcagacaactgtcgcacgcttctccccctccggcttctacgttgcaagtggtgacgcagctggaatagtgagagtatgggattgtgtcggtgaaggaatcaccaagggtgaatatagcattgttaatggtcgaatcaacgatttggcctgggacggtgactcccaacgcattattgctgtcggcgatggtaagcagcgatatggacactgtatcacttgggatagtggaaataccgttggggagatccacggccatacgcaacagctcaacaccgtgtcaattaggcagcagcggcctctgcgtgccgccactgctggtgacgataagaagacggtattctaccatggaccgccgttcaaattcaacaacggaattgctgataagcactcaaactacatatacggagttgcctttagcccggatggttcgcacttagtcagtgttggcgcagaccggaagatctggctctacgacggcaagacgggcgagaccaagggtcagatcggtgaaggagaacacactggcagtatctttagtgtgtgctgggccaaggattctcgaaagttcgttactgccagcgcagaccggaccgtcaggatctgggatgtggaagctggcaaatcaacccagacctggaccttgggagaggagggtgctatggctgttcgtgaccaccaagttggcgtggtctggcccccaggaagaactgataacctgctcataagtttgtccctcagcggagacttgaactacctggtcgagggaactcctgagccccgacaggttatctcgggccaccagaagagcatcacctccctggcacagaccactgtggataacaaggaaactctgtggacaggcagctttgacggaagagtctgcaactgggatgtggcttcaggtaaggccgaggagattgaaggagatgcccaccccggttacgtcgccgggcttgcaaccacatcagagggaagcggtagaatttacagtgtcggctgggacgacaccctccgttctgttgacgctgctgctaaaacatatacgggcagcgcttcaaagctcaatggacagccaaagggtgttgcgactggtgacacgaccgtgcttgttggcgaagccgaaaccgtcgagattttccaagatggcaagaagaccggagaatacaaaacagactttaccgctacaaccgtggccgcgcatggttctcaggcagctgttggaggcgagaatggatctgttcagatctgtgctatttcgagctctcggctttctccccgggcagacattaatgcctctcgcaatccaatctctgctcttgccttctccccagacgcctcccacttagctgtgggcgacttgcggggacgtgttctagttttcaaggttgcagatggcagtctagttacagaccgttggacggcgcatactgcacggatcacctcacttgcttggaatgaggctggttcacacgttgtgagtggatcactggacacaaacatctttgtttggagcttggctaagccaggcgactggcttgagctgcagaatgctcacaaagagggtgtccacggtgtaggctggatttcaggaggctccaagatcatctcagctggtgctgatgcagcggtgaaggtgtggaaagtagatgggttgcaataattatgaagtactccgtagctgtcacagtattttcctacgaaattataaacgtcgagagcttctctttgttgacaaacacattcgaaattagcatcgagtctattaatatcagaaatgcattctcgtaactcaagtaactcaagtcccccgaattgtacacaaagcaaaaagcaaaacaaagaggtgcgtggcaatgggaagtggggagtgactgtaactgtcccagccagccaacaaattgacctgcatagctcctggcacctccccacaaccgtctgacgtcttcataaagcctggatagaagggcgacttgtcgaagatgtgccatggggcttgtacaacgccctaagtccccgcgaagtacgtgaaacccgaaagatgccatctggaactcccagcagctcccgacgttcgcgcccaacggtatgtgctcgcagtttttgacttggaagatactaatcgtcggtgaagctccgtcaggctacatttgtcctcccaaaaacaggccagcgcctgaaaggcctcatcaacctccgaaactccacgcctgacaacaatgaggaaaggcgcgggctcctcacaaacgagatccaacattatgagggctacctcgactccctcacgcggcgtatacgtgataaatggacgcagacaaatcagtttgttaggtcggaaccgggtattggagtcttgaagtacagtcttgcgtatctggtcggatctctggcaacttttatccccgcggtctcggccatgctgggccatcaggatggaaaacacatggtggctacggtgacggtctactttcaccctgccagatcccagggtgcgatgttcaaggcctcgatctgcgctttcctggcgttctgctattctaccttcttgactattaccagcatgttcgtggagatgtttttccaggacacattggaattgcctgcccttggtcatgctgtggtcctgatagtattctgtggcggtgggcttggctttgtcggttggaccaagcaacgactgggagatcctctggtgaatgttgcctgttcactcacggctctgtcaacaatcacccttttaaccaaggagggttctgtacaaagcggtgatttgtctctttccaagatcttccaagtcctaaagatggtcgtgatgggcgtggtggctgtcatgcttgtatcctttttggtcttccccatatcagcgcgtaaaaagctgcgctcaaacctcgtcaccgtcaccgatacattggctatcatgatggcacttatcacagaaagcttcttgagcggatctgaggaagtgcttctctcggctgaattcgttgacgcagaggcgaagcaccgcaaggcctacagccagctcgacaggctcgtccgagaggctaaacttgagcactttgtggcaggcactgaaaaggagtacaggctcgaaaagaatctcgtccgttgggtgcaagatattacccataacatgggaggtttgcgtaatgcagcttctctccaattcagtttgattcgtgagactattgcccatgactctgtgtctccggaagatcagcaaggtagctcgactcatgtggactatttcatgaccctggagcggtcctggtcatttcccgaagggtcctttctggagcctattgttgagcgaccagaggaggaactatctccagtcagctcccatcaacttggaagtactgaatcaacacccagacccacgcttcttccagcagatgtcttcactgtattcatctctcatcttggccctgcaatggtaagttgggactcaagaagtatttgatataattcaagactaactagaagcagcgatcgttggctttcacattgaaagaaatctttaaggagattccatttgggcctgcaccggactataaggtctcagtgaatggtcgactgcgaattagtcttgaccgagcgcttgatctttacaaagaatctcgcgagaagacactcgcaaccttgtatcaacaaaaggaaaccatgaaattgaagtcccgtgaagctgaagccgatcttgaggaagtgtcagctagctgtggccatttcagcttttcgctcctcgaatttggggagcagctccgagagatgctttctatcttggatgagttgcagttggaagtcgaagagcggcccaatgggcgaacctggtcgtggcttaaagtttggcggtggtcgagaaacgcggaggccgctaaaatagcctcatttgacgatggtacgtatgcatacaaatcgttgagacatggattatatattaattctctgcagagacagcttccaatccaaccggtactgggcaggactcccataaacatgctaggcatgcgtcagacggcttgattgcacatgatacactctctgtcaatgtccaaacacgaaaaggcccttcggcgaatgaaacaacaaagcaaaggctcggttaccgtttatggaaatgtcttggattcttccgacgagatgatacgaaatacgcgatcaaggttggggcaggagctgcactctatgccctacctgcttttcttccttcaactcgcccgttctatgggcgttggcggggagaatggggtctgctgtcctatatgctggtttgctcgatgactatcggggcctcgaatacgacggggtatgcccggtttctcggtacttgtttaggggcagtcgccgctatcctagcatggaatatcaccgctggaaatgtatttgctcttgcattcttgggatggataatggctgtctggactggatacatcactattgttcgtgggaatggacccatgggccggtttatcatgctcacttacaacctctctgtgctctacggctattccctttctcggaaacaagcaaatctggacgaagatgaaggcggttctcatccaatcatggccgagattgcactccatcgagttgttgctgtgttgtctgggtgcatttggggaatcatcatcactcgaatgatttggcccatcagcgcaagaagtaggctcaaggagagcctaagtcttctctggctgcacctgagcctggtctggaaacgcgatcccctatccatcatggccaaaggcaaaaagtctgttttatacatgacgccccgagagaagcttgagattgaacgatttttgtctcggttggaatctctccaggctgcggcaggctccgagtttgaactgaagagtgcattccctgaagcctcatatgccaacattgttcgccgtacacgcagcatggtgaattctttccttaccatgaacatcgagctgatgaagaataatgtggccactgaaggtgaaatcagccttcttcaatacacaaaatcagaacggctgcagctatctgctcgggtgagccatctattatcaggtcagtcctcttgtaacttccttgtgcacttgatgcggcgctgattatcttccagtgattgcttcttcgatgaaactcgagtaccctatgagtgatgtccttcctagcattgagcatgctagagaccgattgcttgctcgcatctatcgctatcgcctggatcatgaagcatctcaacagactaccgatgaggactgtgctttgctttatgcatacagtgagtatctctttggtttctcgtcccttccaccagttcaatacactgacccttgtccttctagttttggtgacaggccaattatcgaatgaaatcacggagatcattgcagagatcggacaactgtttggggtattaagtgaagatgtagtgcagctatcttgaaaatctagctgatcaatttgaaaagccctcaaaataacaatgtagagaaatatatgtaaacatacaaggcaacactgctaagtttggcgcacatcgatgtatccgtttttggcgtctggcggggaaccgcaagtcggaacctccccttccactcaaacccatcgccatctctttcattccatcaattttcatcttcaattcatcaggttgtctcatgaaaacatactctcttcccctatttctagtttgaaccctagaatcctccttaatgaaggcgtaggtgccaatattccctgcccttcggcgtcgcccgtcgcgccctcgcgagttcagcaaccatgcagattgatccggcggctctgagtcggagtgactctgtctcaaatccaaagggcaccgtgcccaatggctcagtatctgcgaagacctccagagctctgatatcggtgccgcgactagagctcgagcatgcctacacggacctgaaggccgccatcggagacaagtgggccgaatataaggagtctacagctctgttcttactaggtatgtcgtgatgcgcatggggtttctagttaaatggcgattgcttgcgctccgcggagagtgtttctcccttccctcctatgtattggcctctgttcgatcacctcctaacttcttgcctgatgataggacactacaaccagcgcgaatactcctcacgcgtcgattacttcttgtgcgccgatcctaaaaacgagcatctacataacaatttcgtatgcgcgctcatcggaaacctcacgcgagacctccccgatcacggcgtcgcaaactgggtatcggccaacgacaaaccatccacggtgtcgaaacccgtctccggagatgctgcggaacaaagattgaagacggaggttatgaaactacctccgagggaccgtcggcgcataaagggaatcccagaggtgcgtagtcgcaaacgatgactaacaccttcacccaagaacccgacagctaacgatcaccagcgagatcccaatgagaaggtgcttacagagcttgaagaaagctatttagctaagcaattcaaattacccagccaggttcccgcaagtgcaggcggcttgaacaaaactagtacggcaacactctctccgttcctatggtcaattcaggaaataatccctaaccatctttctccattacagactgggagctggaaatccgaaaacgatatgcccagccgctagccgcagaaacaggcgaattccccgatgccgaatccatccatgcccgcatggtcccgatatgttacgaagaatctctccccagcggtgctgcgctcccatgtgctgagttcatggcaattgcgacggaaactttcgtaaaggaagtcttgtccgcagtattctcgcgcacccgttcaaatggcccatccggtacaatcaataacatgatgatgcgtcaataccgacaccaactagaagttgaagagcttgcatacacacgtggggagatttcgaaggattccgccacaggcctactccccgttgaagcgagagaggccaacctccgaaaacccttaggcgttagagacctgcggttaactctggagctgggcggcggtgtcctcggccacatgccgctgattgtagaccagatcatgaacagttacttcgaagacgaactcgagaccgaaagacacgatcgaatggagaatggcgctggtgaaccgcatcaagaaatcaaacccgaagacgagatggacctggacgaagacgaagctgaagacggttctctgctagactgggaaggcggcacgcttggtgatcgagctcagttgagctctttgctcgacgagtgtctgtccatggctgcatgagaattttatacccccaatgtctttttttccccgtttcatacatgctacattacatgctttttctgttcttctttttttttttttttggcttcactcacgatttggatggtggctcacggcgtctgggtactaccaagggaggctgtcactgtttgtggcgccacattatttgcatatggatttggagtttgaagatatattgtcttatccgttctcgaccgcccctgccttgtcctctatattcaccttcctattttggtcatgtacagtatcacttctcaaggacaaggtcaagcggtcgatatctggaggattgaaggaaacctcgaaaacaaagagacgtaaaaaaaagctgaatggccatgacctctgttgggaagaggaggtcttgttcgatacccatgaattctactttacaacttggttatcttgagaagttattacatatttttacattaggaccctgaacttcttgacgtgagtcttagcaaagacagacccctgtcaaagatgaattccatgggctttttgcccccgagacgcctgtagatagtacaccagaagactgtgctagctagttgatgatattcgcgacaagcttcagaagctcctcggtagtcttgtaggcattggccgggtccttcgcgatggactgccagatctcaccgtgcttgggttccattgacatgcacttcgacacgacgtctgctcgtttttcctgtaactagatgtcagctggatattccaatgataacgataacacagagcccaaagagtgaatgaatgaaaaggggagagagaaactaacctcggtaccatgctgcataaggaacttgtaataccaagcccagccatcaccgtaatcactatccaagacgatcgccttctcaaaccaggtcatggccttctccagccgacgctcgccccagaagatacgcgcaacagtgatgaacagaatcgggtcgctctcgaccttcttgatagcctccagactgcgtgccttgcgctgagcgcggggctcgagataccagatgctttcgctccacagaagccccgatgttgggacgtcctggatcgcgcgcgccatgaggactctggcctgggagatgttgttggcgcgacgttcaacgcgcacactttcggtccaaagctctgcgttcttgggaacggccaagcgggcccggtcgaggacggatcgggctcggaccacggcgcccgctttctcttccagtcgcgaggcaagtagccacagcgcaacggacttggggcaggcgcgggtgcctgttccgtatgcctcgcgcgcctgcgggagcttgttttgcgcttcatagatttggcccttgatcatccagagcttgtcggccttcgggaagagttgcagaccttggttgactagatcaagagcgtcgtcgatgttgccgagctgccgctcgaaagcaacgctcttggtccacacgcgatctgtgccagcttcacggcgggcggtggccaggagctctcgggcttggtctggctttttggcgtccgcttctagcttaacagcagcaagccagatatcttcattgttagggttttggttgaaggcacggcccaagactcgtcgagcatcgtcaatatctccagattgccatttctccttggcaaggaggagccagagctcctcgctttgagggcatgcttcgactgccttctcgaggacctgccagagagcttctttggtgccgtggttgcgctcgaggtccgctgctgcgagccagattgatcgacgattcacaaagactcgcagggcgtaagcgtaaattgcccgggcagtttcgtagttaccacgggcaatactggccttcgcgtcgtccatccagatatcttttcggtcatcatcctcatccaggccccatccgagagtctcttggatgatactaccacatgtaagaacggcgccttcgctttcgcatttctcggcttctgtgatccattcctctctctttagcatagcgttctctcggaccagggactgaatagcacgcttcatgacattgaccctagcgaatgtacccatctgttcctggagtcgagctgcagcaatccagatttcgtagctggtaggaacggccttgcgagcagcgttcaagactttttgggcattttctggggtttcaagacgagcaagggcaagccacaactcgactgagagaggaatgatttcaacggcctttgccagcagcaagcgcgcatcggcaggatcgtcttctaggttgacagcttctttccaaatctgcaccgattggggaatgtgtagaatagcttgtcgcagaacattctttttggcacgggtgtccgtttctaatctcatggcctcggtccaaagtcttgtggaacggtcattgtttttaattgcattcgctgcaatgatctttgcgttatggccttcattgagtcgaatgttttccagccatgcgtcttcacttttggggcagagctcgcaccctttcgcgattaggttcctagctgccacagtccggccagcaagctcctctagacgagctagcgcaatccaaccgggagcatgtttaggattggtcttggtaactgactctaacaaggtacgaactcgcttgatatcgcccacctcaacttcaccagctttggcttctgattgtgtcaagctggtgagataacccttcgggtcgatatccgtagaggttccggatgcagcctggtcaagtcggaccttcagcactttatcgcgcgccgcaccgatatctgcgaagttcatcatgttactgtcggcgttttctccttcgtcgacagtcgtttccgtgccatcttcggcaattgtcgtgccatactgagctgagtctctcgcgccagcaatgacactatccggaacggcgtagtgccgctgtcgggcgttctgtttgtctcgtcgattcttgcccgtcaaatcaccaacctccgggaggttggcccattcttcttcggataccgaggcgagggtgcgtttcagatcggcaaattggtgttgaattttcgggttattgcgttcgtattctagctgttcggctttctctcgagcttccctgtaggtagagagcgatttaagtcggtattttgtccaaacgaccagagctaatccgataaacaaatggtttcggaggtgaaaatgggagggggaaatgggagggatatgactaacctgcgagctcttcggcgcttgtccattttctcgtctacctcctggtaaatacggtctgcttcgtcgtcttcttggtcgaactgcccgtacgcgaacagcccgacctcgttgtcgggatcctggaaccgctcatcttcctcctccttatcctcgtcttttccacctttctcgcgtgaagtggcgccgtaggcagtgggtgcagcagcccctagaagctgagctctcttggtgagagcagcttggatctgttcgggcgtaggtccctcacgcgccgggccaagatcagagcgagtggtgaatcctgtcgcaccacgacctagaccagcgacatagttttcaggcgctgcctggcttaggaaatcctttcgtccagaagccatatcgagcacaacacaactcaaagagctcgacgccgacggcgcagaaggcgaaggcgggctcggggaaatggtattcccggcgccggcaatcttatcgcaaaaaaagttcccgcccacattgaagtccatggtggtttgttgccgcaggttttctctcttcttgataattgtgaaattacagaggattccaagatgccaaaggttaataaacagaagcgcaataacgcggcttcgcagggcctgtcagatgctgccgccaagacaaaagctgcgcacagcatcttcaagatgaacactgatattggccagcacgttctgaagaaccctggtattgctggtagggacggattttcactgcactataccctactctagctaacaggtatctaactagctgcaattgtggaaaaggctgagctcaagcaaagcgatgtgggttacaaaagacattcattggcttaacaaacactaagagtgtgaatcaacagatcgtcctcgaaattggtcccggtactggtaacctgacagccaagattttggaaaaggcgaagaaatgcattgctgtggaattggatcctcgtatggctgcagaagtcaccaagcgcttccagtctactccataccaaaagcgcctagaggtcattcttggagatgtgatgaagacggagctcccatacttcgatgtctgcatcagcaacaccccctaccaggtatgtacagccccagattttttccaagggttcttcccgggtctaacagagtcaagatctcttctcctctcacattcaagctcctggctacatctccggcgccacgttcatgcattctcatgtaagtctccgctagcaaggctagaagctaccagagatgttttgtgaaattgagagcttactcgaaaccttccacacaggttccaacgtgaattcgcactccgtttattcgccaagcccggcgacaaactttacagtcgactttcagtcaatgcgcaaatgtgggccaagattgatcatatcatgaaggttggtaagaacaacttcaagccaccgccccaggtcgagtcaagtgtcattcgaatggtccccaagaacccacggccgcagatcaactacgaagagtgggatggtctgttgcggattgttttcgttcgaaagaacaagactctccggtccagtttcattagtacgacaagcatcatggaattgctagaggcaaactatcggacatggtgcgcgcagaacgacatcccagtggaggatggcccggttgaagtcgccaatgacgatcccatggcaatggacatggaggagcaggaggaacaggctgtcgaagaaccggccgacgaggtcatggatatggacgacgacgatgttcctgatttcttcaaggagagcacaaatgcccgcctcgaagcagcactcaagaatggagcttcgcgcaagaagcgtggcaaggttgcagagctagtccgtgagaaggtgcgccaggtcctggaggatgacactggcctcggagaaaggcgcgcgagaatgtgtgacgagaatgatttcttgaagctgctctgggcattcaaccaaaagggcattcatttcaactgagcgaatacagaccaagtctgtcccggggaaaaaaagcatccgaaaatagaagttgggaattcggatcatgaattatgattactatcaataagagataccattgtcaggaggttcatcaccagcaggccggaggtgagcacgcgagtcttgaaacaggctttgccagatgaatgcttcgctgagtaagagctcaatgtctttctcggtccaacccttcgttggcaatgcttggaggaacatcatcacctcctagaagacgttagttcctgtttactggtgacgatattcgattacaacatcgtacctggaaatccatcttgaccaattgatctgtccacttgaccaagaatgcagcgcagacatagaggtgaaatcgagagaagccctgctcctcagcctagaataacgatcagtatcatgccagacagtccctgggagaaaacgtaccatgtatgtgtcccacatgcgtatcgtatttttgatgctcatttcccgcatgagcaagcagttcatccatcggaaactaaattgcataaattccacaccttcttgttccaggtgctttgcgagtgctgcatcgatgcgcactgtcaagtctcgtaatgccctgacctgtcggtgaatgccaggctgggcgtatatgtagttgtcctggataccgtcaagaagcttcgtcaaacaccagaaggtgtccgcttccaccgcatctaacacactccgaggcaattggccagggtccatgccttcttcaacgttcaaatcggttatgtaaacgcccaggaagacctgccagaatggtgtgactagatcattgataccttgaacataaccacttgctgggtgtcggatggcccagagataaaggatgcgttccaacgaccgctgggtggcttcatagccatacagcggaatgtggggactggtgcgtggaacatcaatgctaatctggtgccatactgcctcatcaagtcctctgccgcggcccttgcttgaagaggggtttgccgagcttgccccactacctcggtcaaaggcttgccggattccatcaaggtattccttgcgctttcgttccagagtggagatgcgtcgctcactatttgtaggaagatagccaaggagaagctgccaagtcattggccgcacttcttctgggacgcctgaccaagcgagatcccgcagctcagtaggcgataccgtgctcgcttgcaagatgcgcttgaacttgttgatgcgcgtaatgcgactcgaatgaatgtccctctctttgggtgaagcatctatcggaggtggggagtggttgatgaggttcaaagcattagcaggatctataactgtcagcatggtcctaattttccagtcgcctcatacataccatgtaggatgtccttgtattgaggccgaaggatctttccctcccccttgcgagcagttggatacatcggggcaccacgctcttccgcaatatctgaactatccgcgcgatgtctgttggcggctgctaatccatacccaagtgtcgaggggttgccaccactgaaatcaatattctgggccttcaaaggcgcggatctttttctcctcatactagcaagactagggagcccgaattcatcctcatcatcatcgtacacaatctcgtcctcctcatcttcttcttcgtcttcttccgtggggtcgcgactccactcgtcgaccccgtcggccataatgccagggtagagttgtcggggaggtgaggtcaccatgttccctgacttgcgagccgagtttgatgcagcatttgtagccgatgtcttcggaggtgttctcggcgctgagtgggaggaggtaggtctgccaagaagacacttgtcagtcatcgtttctgataaattgtctggatatgtagaatgtatttctagcatactgtacaatattggcatgtgagtaggatgcgcccacaacagtattcgagccatagagcttcgacgatccctgatttaggggcgtacttcggccagcccagaatggcgatgcggcgcgtcttcaaacaacgttagcatccaacatacaccacagctgttccatagctgtaggagagggtgtatagagctttcacttactccgagttgtctgcaaaaaggggagaaaggcgacgtaagctatagctgcgattgaaatgcaaggggaggcaaaagacacgaaccaacctggaccatttcctagggatacagtcagttcaatatcctgcgacacaaggatcgaagaaagccttcgaattgcgacaaaattcatacctgttgcccttttttactcgccatcgtatgaggattcagaggtgtgctcatgcgggagtctaatacacgtgcggggtggcactgtgataggatgaatgccgtatatcatgcaaccaggccatgtaggaacggaataggagatcaatagaccatatttgggagtaatacctaggcaaactcgagttgaaaagcaaatcaaactaatattgtaggttctaaccacatctagataccaagtgcctagctttcgccccgactccggcgtgaagaacgcattatgtaagcaatgcgcttgaactcccgcggtgctggacttcctaacttcttcttccgcctgctctcagcttttcgctgtccagttactttgaattttgctctctgatttactaaggctacacgcgtttccgcgactatctctgcttttgctttattcaacgctcactatttaatcatggctgaccctgaggatggagatgatctcttcgctgatctgtatgttttctacttcactttaccttgaataatgaaattctaatcaggcttctttcatagctacgacgctgatgattccaccaatcgtaccactgcagtcgaggcgcccaagcctactgatctaggcgcgaccaacttggctaccactggagactctgctcaggatttcagacctgaccctgttggcacatacgaatcgcaccctagtcagccttcggaatttgacccgggttaccacaatggttctggaaatgcttatggtgcccctgccactagccaggcaccccctcctgccgagaccgagtctcacggaacaggaattaaagaagacgggtaagtccactaattgcgtttcttttgcattttcatgttcgaactctaccccaactgcatgtatccgtctggttttgggctttacctcgtcagtacaggcctgggtcgcgcaattgctattcatgggttaagtctgggtgccggaaggagtctcctatctgcgggttaaaatctctctgggatgtgggctgttggctgtttgaggaaaagtccaccggttggttgacggcgcacgcgttttcaaccttggaaatgagggagaacaaactgcgggctcggcgaccatcaagacgtctgttcgagggacccattcgcacaaccaccaacgtctaccaagggtgatctacagatcatattgggagtgctccagcatttgctacacggaatcaagcagaggctcgaaagaaatatcgcctgggacccttgatcaagacaatttcttgcgtgaatcaaccacaccccaaccatggacctttgtcacaaacgattcatatatagtacagccgatactatatagtttcctgtcgatataccttgatagggcagagcaagaagtagctatctagcttgagactctgtgttagacaaggcaaaggttttcacgagtcagacagacagacagtgacaattcactttttacgactgaaatacttgcacctcctcgcttctcatctcgcctgtctccggcttgagaaatccagaaagagaaggacatgaattctgcatccaggcccatgtaaaccagtgggcttgacgttaaatccctgtcatgaacatcaaaattgctcaagaccatacaagtatacattgacagtgactacgaggcacaaagatcacgtaccggccaagcacgtgcgctgcttgttccagggccgttgtgcccagaatagcgaggcttttcgtgcactcgaatagcccatgaatagcactacctccccttaccttttcacgttcatttacttcctttaccctaccacattacatcctgtcgttcgccgatcataattggtccggacatttgctctttcattttcatgaacagtcgctaaccgaggacaacacgtggttagaaagatgttcatcggtggtctgaactgggaaactacagacggtaaatctatctttcttacacggtaaatgtatcatatagctgacatatcttgaacgtcatttagaatccctccgtgactacttctctcagttcggtgaggtgcaagagtgcactgtcatgcgagatagcgccactggacgctctcgtggctttggatttttgactttccgcgacgctaagactgtcaataccgtgatggtgaaggagcattatctggatggaaagattgtaagcatcacctcgcaattgggacaaacaaagtgaactgttactgaccacatcaaagatcgatcctaagcgtgctattcctcgtgacgaacaggagaagacttccaagattttcgttggtggtgttagccaggaggctaccgagcaggactttaagcaattcttcatgcagtttggccgtgttgtggatgccactcttatgatggacaaggacaccggacggccccgtggattcggtttcgtcaccttcgacggcgatgctgccgttgagaaggctctctcccgtcctcttgagattctgggcaagccaattgaggtcaagaaggcccagccccgtggcaacctgcgtgacaacaatgatcaacgcggaggccaccgcaacggaggataccgcgaccaaaaccagaacgatggaggtcagcagcaagcccctcagcagggacagggtagttcgatgactcctcaaatgatggcccaatactggcaacgcatgcagcagtactttaccatgatgcagcatcagatggccggtcagggaggaatgcctggtatgaacatgggcgctatgaacatgaaccccgctatgatggcccagatgcaacaagtgcagcagatgcagatgcgtcagcagcagcaacagcaaatgggtgcccagcaaggtgctatgagccccggccctcagagtcctggctcccagcaggctatgcccaacatgatgaacccggccatgatgcagcccaaccaagccgttgctgccggcggtcctgccagcgattccgctagccctgtccccaatgccgttgccatggccgctaactacaacaacggaactccaaactcagccagaggacagactggacctggatacaacgcgaccgagcagatcgccttcgagcagcagaagtatgaacagcagcagatcagccgctcgatggatcctcgcggcttctcgccttaccagcagcagggtggcccaacctcgtgggagggtatgtacgatgaagttcctcaacctcacgttccgactggaccagcaggtatgagacgcatgggaagttcgggtagtggtatgtgattcttacgagtctttgcatattgtgtccctttcatctcaattcctttccattcctactttatttgcgcacatcaactaacccgtctctcaaacaggaaccactcctcagccccagagcactgctcccgccaatgctcccactggaccccgcaacgccggcaagcctggtgcgaactaccgtggcggcggccgaggtggacaccgtaccttccacccttaccagcgctaaagtgtcgttgttgctccttcaaatgatgcatctagtcgcttctcgtttcagatacgatttcgtttcttttatgtgttttctaagtctttttttacctgaggccagcgattttgggcctcatggattgttaattgcgtggccgccagccgccaaggtgacgtggaaaccctgcgagctggttgtattgacaatttccataccctttgacttcactctaaggttatctggtccggtgctttcgtgcttttgttcgggggcgctgacgtttgagaatcaacctgggtcgaggttatccgtgataagcgggaagggaattgttcggtgatcggtgaaagcgagtcttcaactcttgttcgggctcggtgatacactactttgtcttgtggagttagcctcacaatcaaaagccgaaagtgttcattcaagttccgttgtaaatggtcccgtaggtggaggtcaaagggcggaggcgaagagcgattgatggattaaataaaaatggtcgataagactccccagccatgcatgataggtgacttatttatgcgtggccagcgcgacagtcgccaaccaaaccagagctattttgaatattcaagctactgtctcgaaccaatcggtactcggggatgaatttccatatgcttttgagcacagaatactcctttttatagcgtggtgatcacattgatttcatgggttgtctttcagatagggccacgcaatccacgtgactcagatgattgccagttggcatcgttcaaccagttcacggatctcttaggaggtttgctaggcattgtcatatacctgaacaccgaatttccaacatctgaagggaaatgtactatcagggagtacaaagggacttcttcacgagcctgttcagatatatgactcccctcactcttatcgcttccaccatgcattcccatgtttctgtctatatctttgtgtcatctaaggaatccaagttatatatagtgcttaagtacatgagattatgtttgaatactttataccgagaaggatagcatactcgaactcaacctcggactgtggttgggactgttttccaacaatatatatagtagtcaatcataagagatccattggccgcaatgtactcgtctcatcaggattacaagactatgaccacaaaatgattcttcggaaatccaacatggagaaatgctcatcaattgcaagcggtaatataaaatgatagatggtaaacatggtaatgaatgaggtatgtatgaagacaagataaaagaaagaatgaaagtgatatcacacaagaagatgcatctaaaggcgggaagaccagtaaattcccagccgccattttcaagcacgctaaaatccgtcaaaaaaaagtaactcccaagccacagcgcgcgtgcccgatccaagaatatcgagaagaaaggtgagaaacatgggagagagagagggagagagagagagagagagagagagagaaaagaattgtaacgtcatatcaagcctgtgacgcccttcgttggttgttttttattggtttttatttcatttttttaatatgccatcccgtagcccggggctgcaggacgacggccttcgagagagcttcgcgagtggcggctgtcggggcttgagctgcgcgcgtgcgccacgccgtagtcgttattgactaggcggtcgcgttcggtgttaccaggtgatccggcccgcttgggctcgtctctgtaggtctggtaggggccggtgaagttgaagttgctcatctcggcgtattgcttgcgctgtgggtgttccatgaggagcgagtcccgggcgtctaggggagtgaggtcgtcaatgtcgcggtttgctttttctataagaaagggacggttagtaaatggacatgatgggatgggacgtcgctttgacttaccagcttctcttctccgcttagcatgtgggttctcacggtagcagctgatgaaggcgttgactgcaatgaggatagcgaggacagcagtgagagtagactgtacgacaatgaggacaatgccggtgacggtctttgttgtttgagacatgccgagctcttcaacgaagaccagaacgcaagcaatggacagaacacggatgacctgaacggcgatgttgatgcccagtgatgccttggtggcatatgggcggctccacaccaagagtcccaacagaaggacttcgcaggcaagctggccggcgctttggaacagaccgtggccctcgccacctgcgatgatgcagcccttgaccaatgcgtacataatgacggggatgaagatccaccagaagtccttcttgtagttatcgtagaacagactgtattttttccaggtttctttatcttcgtacaggcgggaggtatctccctcggccttcttgtacttgcgagccatgtaaacaatgcgaatagcaaagaagagaagaagcgccgtgaatagagagagggttatagctgctagcagctttgctgcccacgagtcaccctttcgaagttggtagacacagtatagcacccagatactgtatagcacgaggatcatgttggtgattgtccgtgccatcatgccccaataatccttccggaagtcagacagcttgttagggaagtttccatacagcgcccacagttccaggatgaccttcattaaaagaataccgacgacaaccaccgcgataacgatggcgaagatcacgaggatagtcatgaaaacatcggcagaagggaccatcagttcttcagcgacttgcttcaggtcggtgattttgctggtagatgtactttcagtgcttgagctgttcgaaacactagcatcagtagaagtgtcaaccgagcgagcaaccatctcgccgaattggatggtgtactcccagctccgtttcgttgtgttggtggaggatgagctactttgcgtcgtggaggaattcaacaagaactcatagctttcatcggtcaagttaccacctgtggccgcccgaaattggtcgatggacttcatcagaccaggccaagggatcataccagtactccacatgaagttggaggagaagctgcgatagacggaggggtaggcgacactaagcatgccgttggtggccatggaatggaaccagcccattacatcgccaaatccagggctggaggacggtgatccaacagttcccgccgagccgatggcagagacaccgctcagtgccagagcgcctgccgcaatgcctgccgagacgtatttgaccgcagcgacgttggtggtgtggccgttagtcagttccgactgaatgcacgccaggttgctctggctttgcttggatttcaggacaagcttggcctgaccatccaagtcgggcatggtgaatgcgataccagggatttgactggcatatgcggacgggacgtccatggacccagtggccttgaaagaacccttggggacggggcagagttccgcgacatgaatgtcatcgccgcagggatcaaattctttactgtagagttggctgccataggcagtgacggtgatagtcgccgacacattctgttccatcgcgttggtaccagccaagtcgaagacaactactccagtagaacgagtgtaggtaacatccatcttttggacgttgattgccgaatcggtcatgcataggtcgaatccgtccgtagataggacgtcgcttgccagggcttgaggcaccatggccaggcctagcagagcccagatgaagttctgcatgttggccaagcacaattgatgtttgataggtgataccaatctaaatctaacggtttgagccaaggaggcgcgtagtcatcaaggatggaggggatcgactggcgcgatgatcggacgggttgtaaggatatgtggagcgactgtaggtaagtcacaggggggaaaattccaaaggaaaggcaggatcaacccgcgaaagaaatacaaagataataataataataaatgagtcgagagggtcgcaaggacgaggcggctgtgagacactggttttcgagcaaccaggagctgcaaacaagtgaacgagagacggtgaaggagggtggtaggggaagcgactggagattagtgaatggaattccccctctctcaatgcgatgatctgtgaaagaagaaaagagagggaagtctcgtagattacgactttgcgattagtctcaacttggcccctgaattttgagactgattggcctcccgtttcagtctagacctaacactcggcatattactattttccattcggcttggtatttatatcttaatgccattacccatgttattatcccgtctctattattcccaacgatcatcttaatcctgcacaaatctgatctggaaaggcgttgaagtacaccaacacagtggaagctcatatttaaagctttcgtccagaccgtccgacccaaggtttgccactcatgtaaccatggttccagcctaggaggtaacccgaaggagtggcgctaaagttctcccggtcgcccacacccatggaacgcattcctccacaccaatcgaggcacaacaacgccacaccagccacacgggatgccaagttgcccctagcgcgtgcgaattatgatgaattatgattcgaccattcaaattaacaatgttttattacggagtatggagtatgctggtgcaaggcggagatagcggtatgtacctgcagaaccgaaacataacgaccgagtatagactccgtatctatggtccgcttcttcaagaatcggacatccctattagtgcatcttgtgtatgagatgtgccccgcgaggggcaggtttgcagcctgatggaagaaagctgtagggcttaaaactggaccgccgatcgaagatccttgcacaatcccagtcctagacagtggacccttacagggttctggatggacacatacacactgttcttggagaaaatcttgccatactgcatgccaccaatcgagtccgagcactagaaatcctacacatctccgtatgaacgtataacatagaatttgagacttatgtgggttcaccctatggcccgatcatcaatgtgagacaaggctaagcgctggggttccactctcaatcacagagatctattcttgtcgcttttgacagcacagcgtatggcaccccaattattgcgactatcactacggagtacagcagcctcggacctccttccacggtatttattcgttgtccgtatataattccgtactccgtacccatcctgttgctagaaagcagtggagtaatccgtaaaagcttagcagatatttatatctaccccgtaaatgattcagtattatttcacggtttcagattgattgttaccagtaaacaaaccctgggatgatatgaaatggagcaactatgttgtacaaaataggggcctgatcccgtctccaagaagacccactacaacctaaagaatccattaatgaaagcaacataaagaacctcctactcgagagttaaataccaagtgcggagtagtaagtatagttagaaaaaacccgagataaatcatagacgcttctcttaatcccgtcggtaattcaatattgtaagaatacataaatgtagtctataagtccctatcctttacggcacggcataagactttatgattcaagcgtgcaagctcgagataatcattatgttcaagatagtacggatactacaatagatcttttttcaatgtcttgtttcctacataatgttatcgccgaaatagtacataatagttgcaaattgaaccacagactattcgtaatgttaagcataatttctactaggatatcccatgtatagcctgtgatttgtacaacgaaaacatgacttcttcaacgatggagatatactccgtaccttcctattagagccgagtatccggcagaaaatgtggtattcccaccgcctaccacattgtgaccgacaagcaaagacttccatttcaccgcccccctcatcacgtccttctctaggcacaagctcgctaccatggggcccgaggggctcgataagcccgagatcccagataaacctgagaaaagatctcgtcgacgtggggccgaactcgatccattccttcgcacccggctctgtgtgctcagaaccacagccaaatggacctacaaacagatccagaatgaatacccacacatcccactctcgaccatcaaatcgaccattctccgagagagcaatcgtgtcaataaccactcacaagcccgctctggccgaccgtcaaagctgaaggacgaagatcgagcccgaatccgcgaggcttttcatgcgaaccctcaaatcacatacgatgaactgcttgtggtagtggattataaagttggcaaggagtcgcttcgtcggtttctgaatgatgatgggctgaggaagacacagacccctgctcggtcttctttggctgggaaaggagctaccaaaaaagttgatggggctcaatcggttcagtcatatgacacaccttctgctgactgggctggtgatcttgcatctggtctagtacccagcgattcagatcctgcatctgctacagcgagtcaagtcgtcagcaattagacttgttgaaagagataccccgggattttcggcgttgcgcgttactttggaggttgtctgctcaattattcaaccagatttattctgcatgtcatgacaagcataagttatacatgataattatacaacatagagcattggaatgaaaccttcattgcaggattaatacacggcgaacaattggttccgatgaaacatccataatatagtgtgatcaattactgtatcatcaatcccataacctatagaaatgcttgattccggcatcctttgtctggccattgtttccgggcagcttgcttgtatcatgctaatggtctcagataaagtgtggaaattgcaggcaacatgctaacagaatagacccatttctaatcctagacggaaaatgggtaaatcatagccatttggggtaaatgctctacttagatggagttatttttgcagctcctgtggactcaataatgaaatatgacctgaataactagttattttacttcatgcagtcacgttgaaagatggaatttcataccccagtcacgtttggtacttcactatattcgctcttagatatgccaggcggagagaaagaaagcaggggctcactattccataaataggcatctaatagaactcacaggacaagtgatcaatatacatttggctttcatacagcatttggttttgagctttttcaatctagtcggtacattctcaaacactgtgtccatgtcttgtaggtttgattcccttgcggcatttcttgtttatagagcctacgttccaaaatatcctaaagtatacagccgttctataaacaaaggggaaatttgaactttggcggaagagtaggctgacctagaagatgtgatttagttaccaagctctgctgttaatgttagaagtaaaagattcaattactagactctggataattacattcgctcatatgtcacatgttggaatgcaacgcaaatatcaaccagatcaagtcgcgtcattgaaaataataataatagaaagagcccaggctgaacaaagcagcagggaaacacaaattgtccatatgagaatatcatcatgagaacaacaccggacgccggggtattttcctttttcccgaaaagcagccgcctatgcagaaacaaagaaaaatcgctaaataaatgacaaagataagctcatgtcatcgtcacatcttcggccggggtggcggcagtggaaggcacagcggatgcatcagtcatggcatcatctccatctgcatcatgcgcaggggagctctttttcgagtgtgactcaggggtaggagtggcagaatcgctgaacgcatcatcgtcagatccagggtcattttcatctacctcttcccacagacgaacagtcttgtctattccgcagctcacaaccatacgcttgcccttcagtgtacccgtgtgaacacaaagcacagagcccgagtgaccatcgaggcgctgcagaatttccttgctcacaatatcccagaagaggatagagccatcctcgctaccgctgacggcgaagcacaggggctggttgtagagcacgttttcagccccataagtaccgaagcatcccgacaagctgtatttgttgttgacatggccttggaaagtcttgaggacgcggctctggacataattccacatccgaatgcagccgtccagggtccaggccaagacatatttgccgttaggggagaacttgacgcatgtcgcaggcgggttgtcttccatgactagggtgcggagacactgaccgctgtgggtgtcccagatacgaataagtccatccagagcgcatgaggcgattaggcttccatcatgcacaacatcaataccggaaacagggtcagagtgggctggaagagagcgcatgacttgtgctcggcgaacgtcccacataaacacggcctcgtcataggaaccgctgacgaggatgttacccttcggtgcgaatgccatttgatagacgtagttttgatggccatcaaagaccttggtatgggctttgagctgtatcaaagtatcagtaaaaggccctaggacagaaaatgacaaatgagtttcttacagtgttcacgttccagaaacgaattgttttgtcatcggaaccagttgcgatccagacgccgtcaggggcccaggcaagggtggagataccagctagatgtccctcaaagacatgaatgagtctgccactcgcagtatcccagaccctaacagctgcatcggcacctattgtgcaaagtcagttatcaagttatgtagtagctagaccatggacataatatatacccgcactagcaatcatagagcaatcaggtgagaattgcacagccgaaactccacgtaggtgaccgcgcatcacaaacttctccttgtagttcagatgctcaggcttgggaggcaccggagcaacaggcgtcgcagaacgatcggaccagtcatcggcatcaccagcctgattctcgtctgaaccagccacatcatcttccgcgagatcatccgaaccgccctgtgaattgtcgtcacggatgggagaggggctccggtggtggttgcgcatgcgcgaggaacgccagtattcgtctgcgtccacagctaactcgtcagggctctcagactcgctgtagaggcggctagttttcttcgggcgctgtggggtgaacgccttttgcagggtccagctggctcgtcggcgttcagcttcgtcatgctccgagccggcggcgagttcatcggaggaggactcagcgggagattgggcgcgagggtctcggcgccgaggctgggggtttggatgatccattgtacaatagggatatgcaaaagcatctaaacaaacgatgcaaatgcgccgatatgggtttaaagatagcaaccccgaaaataaaatcaatcggacgcgtcgcgaaacatttatcaaggcggtgtatatttttgcgggcggtgagagtgaggcagcttttggtgactgcgtcatattaaaccacgtggacccgtggccgttcacatggattaacacttgtttagcactttattgaccacttcctggtcgactaatacgcctaaatatagctttcaaagctcattctggtcaatatctggcccaatggcctactctattccctccaaagctccaaccgacattcgtgtcctcacattcaactgctggggtctcaaatacatcgccaagtaccgccatgaacgcatgtcggagattgggcggcaattggcaatagccagcccgccgcccgagatagttggactgcaagaatgttggacccagaaggattatgaaagcattcgcgatcagactcgacacatcctaccgtatgggaagttctattacgggggcatatttggtgcgggattggcgattctatcaaaatggccaatcgaggaaagcagcatgttcggctacccgttgaatggccgaccaacggcattcttccgaggagattggttcgtggggaaaggagtcgccagcgcacgcgttcggttcggtcccggtactgctgacgtcgccgaggtgttctgcactcatctgcacgcgccgtatgagcgcgaaccaaacgactcctatctctgccaccggactgcgcaggcatgggagatctctaagctaatgcgtggcgctgcggaacgcggtcaccttgtcatcggcctgggtgacttcaacatggtgccttcctctttcgcgcaccgccttatcaccacgcagagccctgtccgcgacgcctggcgtgagctgcacccggactcatccctcgcggcagcaattgatcctgccgaacaagcacggaatcggcctattcccactgccgagttcaatcttaccgagaatggagctacatgtgacggggccttcaatacttggcgttggactgaggccatgcgcaagcgcctagtcaagggtgaggatattgagattgacaatgagaccccagacccgcgcgccaaacgtctggattatatcttcatcggcgacggtggctacccgcctgcattcccgccatctagctggtcagtccagtcagttcagatctccatgacacagcgccatcccactctcctctgctcgctgagtgaccacttcgccgttgaggctgtcatcacccgttcttctgtacggacataccctccttcccactcttcagactctgccccaagctctcccacttctccttccctgcatgaaacaacttcaaagcccgtctcccccaacgccgccctttctccagacacatatgaccacatcattgacatgacccacacatacgtggcccgtgaacgctctcagcgccgttggcgtctggcgcatttcttggtatctattgtgatttccattggttgcatggtcggcgtgtggtggattggcaaccgcacgtacatcggattcatcctcatcctagtcagcacgctcaacttcgccgctggggttttggatggtttgattggtgggctgtttatgtcgggtgaattacgggccttgaaagagtttgagtgggaggtaagaaatgctagaaacctggtcgttgccgccgagaatagggtaggtgctacttctgaagaaagggacggagatcagaaggattaaaaattttcaccgcaagctggtttgtggaaaggggaattatacgtggaaggtgtggcttgattgcgcggcttaactgtctgtttatatttacttaagtgtagtatagtatatgcccagctagtcttatcctcgactggcaaaactaattcataattcccaagatcaacttcaagatagactacttgtctacagattaagcataagagaattcggcatgaaatgagcgtgtgcatttgttaaaaattcgtcatcatcaaagcgaccgagtccaccagcatcaagcaaggagcaagcagaaacgacaaagagagccagcacgagagagtgcgaatttactcagcacactcgcgcttgcgggtgtcaaagacacgcagagtctcctcagcagccttaacaccactcataaccatagcgccgaaagtagggcccatacggttgaagccgtcgatctccgacagctccataccaccaatgataaggcccttagcgacctcacgggtgttcttaacaatagcgtcctcggccgcattcatgtcaaggccacgcatgccgccgagcttctcaatagcgttcatggagacaagacgcttagcgcagaaagcgccgaatgggccgtcgtggccagtggtgctgacgataaccggggcattgatggtgttggggtccatgcaggagtggtcgtcgtggtggagggtgacgagagtccagttgacgacgacaccggcgaggcggatgtcgttgccgtcgggacgggggatcaggtcctcaacgcaggtcgcgttgaagagcttgacgttcgggaaggcgaggacctttgacaggagcgtcgacgtgaacagcgaggcgtgcttgacgacgacgaagttcgggttcgagggctcttcctcgaagggcacgccgagctcggtcaggaaggcatctgcggggcgacggaggatcatggcgctgaatagctgaccacctagccaggcaccgccacctatatgatatgtgtgttagtggtgctgtggtaggtctacgagagagggacgggtgatcaggtcctcaacgcaggtcgcgttgaagagcttgacgttcgggaaggcgaggacctttgacaggagcgtcgacgtgaacagcgaggcgtgcttgacgacgacgaagttcgggttcgagggctcttcctcgaagggcacgccgagctcggtcaggaaggcatctgcggggcgacggaggatcatggcgctgaatagctgaccacctagccaggcaccgccacctatatgatatgtgtgttagtggtgctgtggtaggtctacgagagagtctgctcgtgtggagccgagactaaccgggcgaaacagaggcctcaatgatggcgatcttcaggtctggacgggccttggcgagtacataggcagtactcagaccacaggaaccagcgccgacgatgacaacatcgctctcggcgtagttgtccagatcctggaagtagcgtcgggtcatggcgcgagagacttggctctcgcggataggggcgaacttgaactcatcccatttgttgccgaactgctcaaggaggtttgactggccatggccggtcagtgtcaccgattcggggacgatgaccttgcccttgatgccggtaggggcaacagtagcaggctcaaacatggcagcgggaggagacataatggttcagagatcaagtcggggatttgactttggaccttggttagtttgactactctatattgggggaggggagggggggggagggcatgatcctttcgctggtattatccagatcaagttaaaggccgtataatctcagaacgaacccacgccgacggtgaacctgatgtctaataagagacatcggattcaccaccgacgcaagaacggacaccggctcatacccagaggttacctgagataccttgatccctgagggataatgtgcccagccaaagaaaatccatggctcccgaaggaagggcagtatgtacttgttcgtttgggatctaaacaagagtcagccttgagggtatgcaagcatgacatggcagtagatagttactgttggaatataaattcgtcacttgattgatgaagagaagaagaagaagggaaaaaaaaaacaactgcgggcaggtcaaccttatatgccaccttggaagagtcataccccaccatccccatcgccatcccacctatcgagatgtcatattgctccgactccctccggttgtccgacgagcttcccggtgagctacgttgcacgaataagatgctctcgagtgacgtttctagcttttctagctcttggctacgaatggccggagcgttctgtcccggacttccttgttttgctccacgagagtaccggtacaacataggtttcctgtgagtacatatggtatgtagaactgcacggtagattcttgaaatagaatgtgggaatataatacgttaatcaacaactcttacactgtaagattgtagctgtcaagcttgtatggagggcgtaggacatcgatgtacgttttactgacggtgactacaatcggaccaaccttgaaaagcaccaaggtcgcagaatagatcaattattatcggaatgaatctacacgaacttgcttggtataaatatgcgaattcaataggaatatatttcattttttcttcgaagaccctatgtgggttttctgacatcataagtcatcacagcgtttagctgggtcatatatatgtgtctatacttaccggatttatttgagctgccgccgcttttatgtagccaaacttcgactacagctggattgatggcggggctacgcgtatttggtacctggtatgggttgctagtgagtctcttgggttgagtatgatgtctttattactccaaaccttatccatataatttcggacaccggaatgtctgcaccttctatcctcgtgaattccccttcggaaaaccctacgttggccttaaaaatgtctgatgactcggactccccagaagtcgagcactcagacgtcgagtgcttcgaggcgctgcccgacgacacagtcgaagccaccgggtcgacggagagtgccatccggaagattattagagaaaaccaagaaacaaccgacgtggtgaaatatatatgtttcacaaacgtcctaccaactattgcggacaatttttctttgcgcagtactcggcagatgtttaatcgccgcactcgatatatgatcatcaagctctttattggggcccatgaaacagcttcatgcggcctgggtggtgcagtgcaatatgagatatacaatatggggctgggcaagtcgattcgcccgttagggtccaaaaccatccaaggtatgttttgcagaaaggaggccgaccgttatggtcgaagtgggagtatcggagtcatatcgaaagctgcgagcagatgcagaatggtggctcataaactcgaggggcgatgtgaagcttgtaattatcgtgtccattagtcgaaagacccccaacatcaagtttgaggctgttactttggacccgactgtcaactccttgcgactgcagtggcccaagatacggcggaccattacggcatcccgcgacgcaaacaaaccctactcacagattaccatcaggccagcagtacctttgatcatcgggtttgaagaattgctttgtcgtcaaccagtcccgcctgaacacgacattgaactatcacctgatcggttgggagggatctcaacacacgtgtggggggagcaaggattctagcttattattacctctatacctctgttagttctcgtagctagcgtcttcaatgacacaatctttgctacaataatcgtggagtgattgtcaaagcgctgtgtagattcttgaagacaggggacgcgacagagaaagatggctgtagaaagaagaagaatgaaggtcatgaaggtttatttagtacatgttatatatttgccatactatttgtttgccatactgtatctcttgtactttatcagtttctcaagcagtttctcaagcagcttctcaagtggttgcttaagcggttgcttaagtagttgataaagtaattgacgataaagtagttaattaagcagttaataatgatatgacaaaagggacttaattttattagtggtttacatacaaattgtaggtacctactgccatactactacatatggcaggaaatatgcctaattgtgcacgcggtactgaaattacaggcagggggggaataacccagtcagaggggcgctttgcgtagcattaaaagttggaatcagtcgcttcgctctgcaacgactatctggaggtcttaggccgtcgagatcactagtatgttgagccgagctctggtttaatcgatgagccgacctgtactctggaaatcagagtgctagatgatgatcaggtgatgcagaatactcagggacgtgctccgttttacccagtgatcaaaaagcggcaagaggtgagcactaaaatggaaagggaaaggtttcgagtgccaggcattatccggtacatatgcaagatgcaagagaatacatgttatccgtaagagaatgcaaaatcacagcacaaaacggtaattggcaccgtaattgtcctccgctaccgggccatccgcaggttttgttgggtcttcttcaatttgaggcccatacttcttgtcaaggcgccggttctcccataccagaagcacacgcagagacaaagcaaggagtgaagtgaagaacatgaaaccagcacagatccccataccctttacatacctcggggcttgtgcatctgggaagatgttggtgcccaggaaaggcccacactggccgatcacgttcaacaggataatacttccaccacggcgagtatcggagccctgattgtctgcacaacgtaacacgtccagtcagtaaaaaagctttgcacagaaaactctaaggatcagaaaagggaatgactcactcagaacccacggcagaatattggcgatcgaggggaagactccacaggccgccaagaacacaccgaagtatcgaacacccactgaggtgcaggtagcgcacaggatataccccacgccaccaaccactgataaagctgcgatcgtcaatccacgctgctgaatgcgatccgccacccaagtggtcgcgatcgtcgccaggaatgaggcaaagaatggaggtgcagtgaggccctgggcgttgatggccgtgaagcccatctccttgagaatggtgggtaggaacacggggagagaagagaaactgacgttacagctgaagtacatcaactaggtacacgtttaatatcagcaagttgtgcgcacaatatacacaatgagtacttactgctgtaagccacgctttgacgtcgagaagcgtcatggctaattccttccattggatcttgactgcacggtccggctcaccagattgttgcattgcccgggcacgcgcaacctccttctcttccttattcaggaacttggcgtcctgcgggctatctggcacgtagaaccaagccagcagggcagctgcgcagaccggaacaccctcaaccaggaacagcaatcgccaattcgccaacgcggaatgtcccgaagtaataccatatgccaaggcaccggcgaatgtatttgccagtggtgcggcagacagaaacataccgcatcggagacccagctcgtggcggcggtagaagaatgatagcagatagggcacaccgggaccgaagccagcctcgaagacgcccattaggaaccggagtgccatcatgcctttccaattactgaccgctgcttggcatgttgccatcaaaccccttttccgttgtccgtcagtccatgttcctatacattcgcaaccccggttgaatgacagcattgcacgtgggtttcataccaggagaacaacacaaaggcagcccactggtgcggcttgacaatcttccacatcattgcttggaattcaaacactgtatatgagatatagaagattgtcaagagccaggcgtagctttttccatcgaggtcgaggtcctctttcatgccggcgattttggcattgctatggtttccatcgtcagcggtcgtgctattttgcatgcaggtccaaggatgatatcgcgaacgaacccgatgttgcttcggtcgaggaaagcgaggagatctggataccacagaaacgggttagagtacaaattcgtttaatgtctggagtttgcagcatacagaaaaatcccaataacgtcacaacatgccagtccaatttccttaccactctccgctctaactcagggtcaatagccggcaagagtgtagtgggtttctcctggtgagtgggcacggcagatttctcaatatcttcatccggggcagtttggattacattctccaactgctcctgcctttccaagaagcccatggtgaattggagacgtcccaacagacaacgggatattaacaaggtgaaaaaggaagagaaaagagaaaaaggtcggacacttttccggagttggggttcggagtcatacttattcgcacggtgagagggaaaaaagcctggatccgcagaggcatactggcgtactacataatacagcgactaatggccagcttctagactggtgattggtgggaactgcagaaacaatttatgcatctattggtcatttggacaggcgaatgagatttcgaggtggagaattggaaactggagaaaatgcggaggaattggcaaagcttaggagagccgctttggtctgataggccgaggtcggggagcagtcggtgtactccgacagtctatatgttgtgctagttatctctttcaagatgaaagtaccttgatattgactgaggttatctatgtggctatttaatagaacagaattctcatgctgtaggtagaaaaaaatgctagtttgtccaagtgtgcggagtatagatctacaccatacttgccaacatcccttgaaatctcttatataaccatttattcatcatgtttgtctatttataaactacatgaataatgaatagtgagtctttcaaattggaaaaacgtaactagttaactataaaaactgatgcctgtaaatccaggtgttctgcatatcaggtcagtaccggggaccgtatcaaaaatctcccgcgtactgtcgcgttcatgaaacaactccatccttcattgctcttgccttatctaccttcatcgcattacaattccgcacttgattcaaatctaatttacacgtgtcttcccaaagcggattgcaaattggcaatcaagcgcgcaatatggatgacccggccacacgcatcccggggcagctggtaagaccccaacagctcccgtgtcaattgccctatgctctgtaacccccccactaacattgtcgcaattatgatagctcccccacatgcacctggtttcgcgcaaccgataccctagcatgcacatgatgccatccgagaccgccgtcgagtatttgacgagtgcaccccggatctgccaatcccagccaatgcattggacattcctcgatggtcccccggatgggactgttatgcttacatggcagccacaaaaccatctaggcaataattttgctagtgatggctatgtctgggccgaccaggaacaggcctttacctttgaatctcgcggctatgtatgcgaggcttcccctgctccatgtggattccattctaatgcttaaggacacagaccgtcgagatgtaccttcaccgaagtggtttccaccctcccaatgagcccgtggcaacacattgccgcaagcgctaccgtatcacctcgtccaaagtaccaaacgctccccagcccgacccatccctgtggattgtgcactacacccgtgcggcgcctcaggaccatgcccccgcaaatcgcattcaagttacaccccaggtccagggcatgatgggccagcgccgtttcctccagagccaaggacaattggcccgcaaggactttttgcttcatgatcgcaacagttggccggttatcaacttcccgcagatggctccccagaactttgggcaacccggtgcttacccagccgctgtgcctcgtggacctggtttctatgccccccagggtcatccaggtgcagttccgccgaatgtgcccgtagccaaaggaccgcgcgggcaccgtgcgccgtcggctgccctcgcttctacaacagccgattttgctgttgaagatgaggacgtctccagtggtgacgctatggatcttttgacgccccgcgatgtcagcaagatgcgataccagcagcatcacgagtggatggaggaaatcttcgcgtcaccatacagtatctcacaaatcacaccggtttctttgggtctaggccgaaagggagagctcgagtctctgactgcgggcttcttcgatgctccggtcggaacctctggcggagacggccaggaggcgggcgacgccccgcaggctaacaagatggagccggctaaggcagaggagttcgccgagcgggtttctaaaaaggtagcgaacatgaccgccgagatcgaaaacttgaagaaacagcatgctcgccggatgcaacgtttcaaccgaacctcattgctcaaggatgccgagttgcgcctccgagagtctgctgctgacccaactgaaacgggcccagagatttggagactggagggccgagtggtcattccaacagaggacgaaacccctcaattggattacattgaagataaagccaagtacagggttgatgaggtaatccgggaagttgagacttcctggaataagcaaatcgtcgcggagcccaaggtatcctgtgtcgagaagggtggtttattggagaagattgaacccgaacacaaagacgagcctgactcatttacaaatgatatggtcatggacgatgattcttcccacctactcaaccaatttggcagcccgggcgttggtgtaggcgcagtctcaggcgtttctgtcaatggacaaccaatccacggcgctgatatgtccggtgatgttgacatggatttgggcgaccagctccacgctggtactaatggccaggctaacgactgggtaatggtgagcaatgacagcaaagaccatggcccagtcggtggagacttcgactttaccaacatcgacagtgccggagatgcgttggcagcttacagcgagcagaacgatgggcttgacttgccagacctggagaattcggcgttcggcgacgcgttccatgcatctgacaatgaacattcgcacaaccccgatgcggacgacatttcctagtctgctccgaaatttttcatatgaaagtgtgtttctttaacgaataattctgcggatcagtcattctagtctgtttcaggtgttgcggcttgctgttcgggagtctggatttatgcaggatgctttagctggttgtgtaccataggattggccgagggaattctctgcttcctctggcttctttttttttgttgcctcgaattgagaggatagagagtgggatctcctatgaatttaatccctatttttcatctatcttccaatgtaggtttcatcgaatgagatatttcccaactaggaaggtaacagttgtccacgggtgtccacgaatattcagaatctggaactaagggacgcctaccttctctatgattatatacttatgtacctatgaagtgcatgaaaccttggatatagtatcataattagctaatagtctaggactggtacagctagctgctagtgtgtactctgatatcgggaagccgagagtggaaaatggccctgaacctttcacgagacaggcttcaaaattgaaagaccatcaccactcacgcataatacaacgtcaaccttgaaatatccgcaatcggaaaggtgatggcatgtatgaactgctccatcgacttccgcccttgcccgttcatgacgtcagtcaccgggactgcacttcctctgagaaagaaaagagaagccttggaagcgaatagggttcgtcaccatcgtcatctataggaaggtgctaccgacttaacattaacctctcccatgttcagttttctcggtttctcatcttaacatatctccccccataaccctaacttgtattgattgactatatctacatacaagaaacaagatgtatgtattctacattctcaatcctcactgtgactaaaaggaagcctaggaaccgcaacctttcattccgatcacgcagggagccccctcgacagcggttcggaatttccaccttccgtggaatgcaagcgccggaattgagccgcaagatgaccaagctgatcaagagcgagaacactgccattggtgcccacgaatctgccggccgcgagcgcacctcgattgccgcccagctctctgaatggggagaggcgactgaagacgacaatgtctccgacatatccgacaagctcggcgtcatgctcgctgagatcggcgagcaggaagacagctttgcgcagaatctcgaggactaccgtagtatcctgaagcagattcgcaacatggaggcctcggtgcagccatcgcgcgagcagcgccagaaggtcactgacgagattgccaagcttaagtacaaggatccttcgagcccgcgtctggtcacgttggagcatgagcttgtccgggctgaggctcagaacttggttgctgaggcgcagctgtctaacatcgtatgttttgattctgacttcgttctgttcttgtggtgaagatagttttgaacttgctaacattcatctcctgcagactcgccaaaagctgaaggaggcttatgatatccatctgacggctgtgattgagcgcgccgagaagcagactattctagctcgccatgctcgtcgtctgctgaactacattgatgacactccggttgttcccggcgatgcccgccaggcgtatgaccacgagcctttggcacgccagatcctcgaggatgccgagaatgatctccgtggatgggaatccagcgttgagcctctcatcaccgtcacgggccgggaaactccggttcatgccaacggaaatgatgccaacggtaccagtgtcaatgaacgcgatgatgtgtcggatggccagtcggatgttctcgatcatgtctctgtggctgagggtttcaccgagccagtgggaagcggtgcgctgcccgcgaggatggtggtgattgagccttcgcctgcgtgatcgtttcaattcttctcagagattcagtggtctcctttttagttcaatgcggacatacttcagctgttatgtgtaaattcggttcttcgcctcagattgggcaccaagacttgctggtgtttttgggaaaggcgttggctggcactgcacatgggggtctatactcaggaaatatgcaaattgtgtattgtaaagtttaattctctaattctctaattcattacttcgtttgttttgttctttattctctttctcccaatatctttcaaagatgatatgaaatgaacatggcgatttgtagtagagcatgcacgtgaccacaggcgccagagtgacgcggaaaccccgagctccagcggagcttcaaccatcaccgactatctcaccagaatccctttcacgtccttctagcatctttttttctaattttctccttatttcctcttccttcagaacacaatggataagcttgttgcccaatactcgcgccctccccatcagaatgagttgtactcagagcaagagcagcaggacctcactgcgagcgtccctccactctcgctgaagttcagcctccctactgtcgacaacgtgagttcctgatgaatactatgggagattctcttgcgactggatgatggcggtttggtcggggatgtacatctatcctgacgtcaacctaagctgcgccgtcatcacagctatgtctaagagaatcgctagccagaaactatacatgattgaaaaaagcgaaataatggactgacgttcatttcttatatctagcactctgctttcctgcgtgcgatgaccgatgaccactccaatcccagctgtcctatcaagctcgcccacggcacaacaaccttggccttccggttccagggcggtatcgtacgttttcctatatttcggttacaccatgggtttcttaattttggagcattttgctgattgaaatattgggttagatcgtctgtaccgattcacgagcgacagccggcaactggattgccagtcagacagtcaaaaaggtcattcctgtatcgcggttgagtcggggtgaggacaagaagacgaacgagccgacgccaggtcttctgggaacgatggccggtggtgcagccgtaagttggccgcaagctaatgggtgatggcgtgatggatgttggttgctgatggttgtcgcaaattgctaggattgccaatattggttgcgttatttgagtcagcagtgcactctgcatggtaagtcagctcgattcttgatattttcaggcatggaaggacatggctgatgaatttctatctagaaatccgacacaagcgccgtatcactgttgcggccgcatccaagatccttgccaacctcacttacgcctacaagggatacggacttagcatgggaactatgttagcaggagtatgtcctatacaccattcatagccatgagattcggaactgacaatgatctctagatgacaccccaagaagggcccgccctttactacatcgactctgacggcacccgcctcgccggtaaccttttctgtgttggatctggtcagactttcgcttatggtgtgctggacgccgagtacaagtacgagctgactgtggaggacgcattgaacctcggccgccgggccattctggctgccatgcaccgtgatgcctactccggtggtttcattaacctgtaccacgtcaaggaagagggatgggtgcaccatggattcgacgacatgaaccctatcttctgggagacaaagctccagaagggcgagttctccaacgtgacatctacgttgtaaatgggtctagaggaatgaatgtttctgtttaatattgatatcgatatgccattgaattatgcttaggtttcaaccaacttgtgtgctaggttcaatcagatggaaggcaatagctccatctccctatagtagtcacctgtctttacaaggttctcctggcctgcttcacagaatatcggttcccaactaaacagctagttgcatagccacctcaatatgtggaaacctccctctaatcaatctaaacttatccaacagaatatccttcggcataacctgcaaattatgaaaagaaagcacaaccccctgcataaaaacaatatcatcaatgcgactcgtcgtctcctcttcagtcgcctgcggcacatgaatcaccacatccgcaatagtattaacaatctccaacaacttgctaatcatcgacgagccatgcacccgaatcgtattctgcgagatcttcgtcaaaaactgcctgagctgactcgacaacctcaacggcatctccagctctaacgacggacacgacgcatgcgaactaagcaaacaattcgacatggccaactgccacaacagcgtccgcatccactgccgcgtaaccaccaaatccgcctgctgcagctccgacagcgccgaaacctccacctcccacaccgcatcatccaactcgcggtgtttccgctccacccacgacgcagtgacctgcgtgcggtccccaatccacagactcataaacgacgcatccagcatgcagaacgtcttgatcacctgcgtccagccgagctggatatccgcgcccacgaacgcgtcttcttccgggtactgggtgtgcgggggcagtgtcaccggggagaaattcacgatggataggaatcgctcgtggatgaagcattgccagtacagtcgttggcggcgggctcgctcagccgtgctgaggctggcattgacggttttgtcgctgatgcggagcatctggatcatgctgattgcttcgcgtaggtggaagaagcctagatcgtagtggcctaggctcatggcgcacatctggatgaagatgcatgtggtggcgcgtaggattgacggccggaagcctattactagtggttcttgggtttccacggactggcgcattaggtctgttatttgtgttgaggttggttgggggctggatttggtggtgcattgaaaggaccgcgtgacatccagggttactgcggtgaaggcgtagatgaaggctgcgtgctctctttccgtgtccatttttgtgattgatgtgcgcacttctgtctcggtgattattgggctgaatgggtatacataggacatgtatgctgggagtaggctttcgaagtatgagcttggtagttggattgaggctgtaggtgctggtggagagagatgtggtgtcaaagtggtgggtttggtgttggtgtttttatatttcgagatgacagctcctcgacgtagtgaatgttttcttgatcgcaataaacggttttctgtgtaggtgcactggagatccaggtgctcgcactgctggcatctttgctggccattacaacgaactttgcggcgattacacgggtcacatgcttttggcactcgtggctgagaagttggactagccatttttttctttggctctcaagagcaagtgtcggaggtagatgtctagtcggaacatgtacttcttctccccgcgttcgatgttggtggcttggcacttaagactctttcagcgtagcgtcacggggttattctccgcatatatgtaccggataattccaatgagtatctatttgtgagtacatctgcgcttcatcgatatcgcaaagcaagctaccgaccatttaacctcacgggtcaccctcccacatgctgtgtatatatgtatagcaggggaaaaggaaaataccaaaaaaacaaaaacatacaacagtgaggattcgctggtggtcacccacccaactactaacacaccggcgtgtggcttgagtacggctgagcggacgggaagccctgttttccacaccctatggtcgtatgtaccagtttacgtatcagaaaggattaaccaactataggatagttagtttataatcaactagaagaggtgggtgcacaatcgacagggtgagaatcgagctccatagaatcccatgtttgagaagttgtaacaagaatgtacccctttggtcggtagctatgacaagtatgtcctttaagcctagcgaggccatatacctcgttcgacatttagtataccatccttctgcctcaataactacttgcacacgtcacggcatataaccagtaaagtactcaagacgattcttcctttttgacagctggtataatagtaggagggggccacttaagagcacccactgtacatacgtcgatggagactcagaaatttcacgtgactctcagtctgtattcaactgccaatagcacagtttgaaaacgataccacgatgtcgtccaaaagtaccgtgcgactgatgtcgccaacgtcgagtacgctgcgacggacctttaccttggcgtcatcaattatttctactattctgcggctatgccaatatacatacaactcgattgatagatcgaaagatccacctcaggggatctgcaccatctgcgacaccccagagtgaaagctccaccgttgtgaattgtctccattcgaccacgtggtctgcatgaaataccaatatcccacactgaagaacacgtatgactcggggttgtgccgaatggcatccgccctggtcatcccatatatactggttggcaaaatttcgatttcatcgtacttatccttgtaggcttcagttatgatttcgtcggggttctcaagcagtagttgctgacggacccaaaggtcttgatgcgagaaagcattagctagcgagccatatagcatcaaggtgattcaatcccgtgaaggttgcacttacacgtaacgtcaggggtgggatcattgcccagaaccaggtgaaacaattcatggtagagcgttgcgctgcgcggaaggacgtccgtcagtttcctccctcccctctgcccgacaagaggactcttggacccaagcttcacgctatatcccggctcgctaaaggacccttgacacaaggtgatcgtgggcggcgtggtcatatgctgcgtggtgcccatgttggcaccgcgcgccacggtgcagaaggtttgcccatcatagtcatcgtctacgaggtactggcccaggtcggcggaccagtaagggattcgctcgttcttgatccaaatcatctggtcctcgtcatagtcccagaaaaggtgcctgtactgatcgcagttttcgatcgcgaggagatgctgttgcccattgtcgtccattgtccagatgtcgttgccttctatgtcccgggcaatgtctgtccgtgcacgcttcttgagccagttgtcgttgcagtacaagcgtggtgtgttatcaagtgtcgttcccgagaggaagttggacactttctgtagagaacctggaagcagaccctgttagccatagccatcctcaaccggagatttggtggagtcttgtacctttgataagcgcaagcgctgtcgcatcattctctccaacaccaaagtacgcccggaggtatcgcttggcgacatcgtgctgggcagcagaggaatcctgcgcatgcgtgatggcctgcaatccggcggtagctaggtctttgctttcttgcaaatactgcgcgagcaatgtcgatctttcgctacagccacctgcttcatcgttatcgagattgactttgaacaatgagccgattgtctggcccgcagcaagggacgccgcggaaagcagcccgcacacgacaattggcttgagctgcatcttggatttggtcttcctatctccggaaaatgcaacagcagcgaggaagaagattttgacctgaccaagtgatctttctgttctggttgcccctgaaagccggcggaagcatccatatccactagtcgccgaggcgagactgcgcgagattagtagtaaattgcatacaacatactagtctaccacatgcagtggtatctgcaagctaatagggccccacaaatggggtctatgtccacaacatcagagctgcctcggcaacgaaccagggtcactatccctatctatatgatccatatctaccggaccatttgccatctcctatggagtgataattggtactcctcaaacgccgcttctctctgccactaggaccagaatgccttccatgcaccccctttccctcctcaccgccatcttggcctcggcgctggccgagtcctcttcgtcctcctgctgggacaccatgcacaactcgaccctcgcggtcttcagcagcgcccctatcgccttcagtctcgaccgtgctaccgcgttgcagtgccaagcgtggtgcgggcaagtctccaactgccaggcatgggtgtttgtcgaccaattgctgcaatgcgacctccaccgcgcggccccggtgaacgttcttcccgagaccaacggattcgtcttcggtggctgtgacccttccggcgcggtcctggatttgccaagactaatatacgccgagactatggtcgagggcgcagcctcgactcccactacccaggctagtgcgatttcactcgccagcagctcgagtggtgctaccccggagaagactcacggggtgcccgagtcggtatgtctctgttagcttcccagctgtgacccaacggttgactgactcctgtttttttttctcgattctagattcatccgaaggtgaggcgccatggccactcgcgccattcgcgaaatcactggcactaagccaggcggacgacagcccagaggctcaggggcgtgattggagatacggataccgtgtggggcccatgtcatgcgggacgtacggaaagtgtggtttgcatggagaagtatgttaagcgaggtggtatttgggggctagtttttgttccagtaaaacccttggcaactttagcgtatcagttgaatatccgtaccgaggtactctccattgaagacccacactgcttgagaaaccgtagatatgggctcgaacaatcgcctgtcattcttggaaatcggggatagataacccccaatgccggcgaacggtgattcagggacacatgggtggatactgaggggcaccggcgtcggccggatgaacagggtctttccagataggtatcaactccggagactagccctagtacatactccacaccggtatctataccatcagtagcgtcgtcgatggtcaaattgctgttccacggacgtaatcgtcccggattcaggggggattcaatatagcgggctcattcgaaacctggataccggcagaaagatccagatcaggccccagaatgggctgccatatatacaagaagagaagctcgccaaattttgacttcttccccctgttctcattcttgtttagcgccctccgccatggtctccttgctggcttgggccacggtgctgctgctcgcctgccgagtgcagctgcaagtacaggcagcggccgtcttcgcgcactttatggttggcactccgccgtattctctgtcgtctgttctcgctgaccgtgcaggtcacaaacacggccaactatacttctaatgactgggagaacgatattcttctggcgcaggatgcgcacatcgacgcattcgccctcaacatggcgtatgccgactcgaccaacacgggtgccctcgctgccgcgttttcggctgccgatagtctcggcttcaagctctttttctcctttgactacgcaggtaacggcgactggcctaaagccgacgtgatcaccctcattcagcagtacagtgctcactcgtcctactacttctataagggacaggcctttgtctcgacgttcgaaggccctggacgcgccgacgactggcccgagatcaaggcggtcaccggctgcttcttcatccccagttggtcctcgctcggagccaagcctgccgtggcgacgggggtcgtggatggtctgttcagctgggcgggctggccctggggcccccaggacgcggacacctacgtggacgcctcgtatctccagtatctggagtcgctgccgtacatgatgccggtctcgccgtggttcttcaccaaccttcccgggtacaaaaaaaactggatgtggcgcggggaccacctgtggcatgatcgatggcagcaggtcctatacattcaaccggagtttgtcgagatcatctcgtggaacgactacggtgagtcgcactacatcggcccgctgtacgaccaggccatggaagcgtttgaggtcggcgaggcccccttcaactacgcgacagaaatgccccacgacggctggcgggcaacgatccccttctgggccgatatgtataaggatggaacggccgaggtgactgaggagacgattatcgcctggtatcggcttacccccggcgcggcctgtgacagcggcggcacaagcggcaatacggcctcccagctgcaggttgagttccccccggcggagatagcccaggaccgtatcttcttctccgcagtgttgggctcgttctcgggcgccgtagtgtcgattggagactggacccagacggttgggtggttcgatgtgccggatgatgatgtcggggtatactacggcgatgtagccattggcgcccatcggggtccggtgactgtgtctttgatgcgtgataatgtgattattgcgacgattgagggcaaggccatctcgtcgacctgtgaacatggagttcagaattggaatgcctgggttggaagtacgtctaccggggagaccgtgtcggcacgaccgacccgtcttctgtcagagcaggtctgcatgaacggtaccggcgcgaataattttgccggactgtgtgggtttgcctgccgatacggatactgtcctctgggcgcctgtacctgcacgcgaatgggcatcgggtacgagccgcccaactccacgggtgtcctcggatacccgattgtgggcgaaggcgcgagttacagcggactgtgctcgtttgactgcaacctgggcttctgccccgagagtgcctgcggcactgtggaggtcccgctcagcacgccgacagtctcgccgttcctgccccccgcctgtgtgtccggttcgggtgagggcaacctagctgggctgtgcgactttggctgtgcccatggcttctgccccatgaacgcgtgcacctgcacggggcagggggcgctaaatgtcatggatccgacaagcgagaccgttgggaccgccgcaccgggagtagacgctaccgtctacggtcctctgtgcgagtacacttgtcaacgcggatactgtcccgaaggcgcctgtatcgtcgccgaggactcggactcgggctcggggtccggggatggaccaggcgatggcgaggtctacattgccccgtcgatctggaatatgccctcgccggtcgtgcaatgtgagcctccgtgctcgctgatcatgcctccgctgcagctggccagcccttctgtaatatccatccctccctgggagagccccgtcgagcagagttacttgacgaccagaacgactacctatgacgacggagtcgtcgaaacatacaatggctatgcggttgccaccaccaccattaccatatcctttcccccttgtacgtgttgagccctcctccccaatccaccctcactgacagtccatcatcagcggtcgtcaccgagatccccgtatggggagtgaccatcaatgccagccaggctcagccaaccgagttggaaatgacgaggagcatcaccctgccctatatggtatggtcgcttcccccgttcgatgaagaccccaacgcgacaagcatgacggggacggtccttccgcccccatatccatggtcccaggccagcaaggactccgagctcaataccgcgaccaccacctggtcgtccggcagtgcgactcccacggcagataggggtaacccggacgtcggcgtctcgtgtaagccattctgccacctgtgtctcttgtgccgcccagactggagcgggggcggcggcgggggctccgacgatggcagcaacagcaacagcaacagcaacagcaacgaggacgagtgcagcacgcgagaggcggagatttgctctaccgtgtgtgtggccgggtccgggtgcgagttcgactgctccacgaccaccggctgttccgtcacggcctcggccaccagcaccgtgggcacgcccgcgcccgccgtggccatcacgctggagcaatggcctgaagccaccgaggagcccgatgcagaggtgaccagcatcgctcggtcgctcgactcccggctctccgccctgtatggagacctcaccgtcctaacgggatacgaggatggagccgccacggccacggccaccagcaccagtcgcgcgaccacgacgaccagcgcccccccggacctcccaacctcactttccgacctccagttcgtgatcttcctgcgcaaacccgccgactccctggactcctggacctggtccggctacctcctcccgacgtactacgacgaggagtacgtgtgcaacaacgcgtacgaggttgtcacgagcaccgataatatcccaaatcaaacggatgaggactccgactacggatacccgatgtatctgggtccgtttgccgcgcaggatttgaactgtgggtatgtgtcccaaggcctgacgccgggcgacgtgcactgcggcactcaggtactgacgtgcctcgagcttgatgcgctgcatgctctggggtatccggggtatacttgtgggaatacggagttttacatgcaggcttggtgcccgatggcagactaaggccggtggttgtgtaccataagactgaatattattgcgtacgagaatcggcgtcgtcatgtaatgtggtttaccccatcagcttttcgtgccatggagttggttttcccgcagaaaatatcccaaagcggtaactttctgccctggtggatccaacttcttctgtgcggtccaatattattggcatccacgaatatgaagcatttggcaccatacaaatttaattatctcaactttttcaggtggtttactggctctctccgtcatgcatgatgcatgaagcaatttgaattaattctaccaccaccaataataaacacggtttaattccaaaacagtcatttagatactatatggtagagagtagccaattgattaagggcattgttgcttatgcccccccccttggatgctcacaccctcccctgccttaaatttcagtaccgccttcctgatcgggtaccactcagaatactttattttttctgccatgtattctgcctacttctggtttatatagtaaaaagacatgcattttgattagaaaaaatcgtatattcaacctgatttctatagaattcaaccccttgctggatgagcagttgatataggatgtgacagaagtgacttaattttggtaggggtttacatacaaaccataggtacctgctgtcttgctactatcatatatgccgtttagaacaaaagcggtatacaaattaggaggcggtgaggagagcggtaggcagaagcaagtatcgaggtaagtgcttaaccaaattaggaaggcggtactgaaaattcaggcagggggtgggggtgagcaacaattcccttgattaaatgcgaccggcaattcatcataattgtagtaaaatagaattaaaaattctttattgttggtggtggtggtaccatttgaattacatactccatggtgatggctttatattcatatatgacggagagagctagtaaagcacctgaaaaagttgagatgattaaatttgcatggtgccaaaagcttcatgatcatcatagggcctggttaatccgtcccggcatcatttagataactacctaaaagcggtctaagataaggccaaaatccaggcatcaaggcccaatctgctgtcggagcgagaaatacaccagttattcttactgagaaggtgtgcacctttttggcctagtggtaacgtggcctgtttttctccgacatctggtgaaaacgacccctctttcctgccgccccgagtaaagtaccaacaacctatgtcggtcaaagcgaatatttcaagacagaatgagcaccatcgagcagtgtcctgctgagacaattgataatatcgtctcgtttctcaacttgcgcgatatttgcaatctccgcctcacgagccgcggtctggcactcagggtcttcggagccccgtctttcggatcccacctagagcaaagacaggtcgacgttacggagcgcagcctccgggccgtagccgaggcaacagcaaagcccggccgactaggttgcttcattagcgacttggtactggtcggcgtggtgaacaacactaaattcctcacgcaagaggtcaagtatactacaggggacgcaggacatcgcgcaaagcagcagcaggacctcgagatcctgactcgacggcaaacagagtatgaaaccctacatgcgtctcgcggtgatattctcctgctgagtcagatattccgcaacctcatggcccatggtaggcgccggggtctccgctccttatccctgacagtcgtggtgtatcgcgaggacgcgcagacgagactgctccccaaagacgggttcggctggaccctgatctggcaggctgccgccgacacgttccttacggcgctggcggcattcgcggcaagtgggatcgcggtacagcggctcgacgtctacaacagtatagagcggtgcagcctagcgtgtaacgagcctagtgccgtgaactttgaatacaatatgctagcgacgtcactcgcgtcgctgaaaacactcgccgtaagcttttcggatcgggttatcaatgaaaggacagaggatctcggcctaacaggcgacccatcggacacgtgggacgagcatttggaagatgagttgagggaacgtgaagatatagagaatgaggtgtatcaggattcgacgtttactggcctccccgccctggtacaacgctgccgggggctcgagagtctagaactccatcattatcaacttaaggatctgatcctctcggaagaggatctgatcttctcgggactcaaccggtaccgtgaacgattcttcccgtacatagccgagatgatcccgctacctcccttgaagcgcgtcgttctccgcggattacgggtgagatcagcagatatactagcctttatacagaggctacagccaactttaagagagctatcgctgcagcacgtgattctcctcgacggggcaaagttcgaaactatcttcggctactgcatatctgaggaggctggcttggagcggttgtacttggaccatttgctggagccagtagtgatggctagtggcgcgtacaactaccgtcgactggtctactttaccggggaacctaaccaggagcctaagctccggcgcagggacctcccacaccgcggtagtaacacagtggataggataggtgcagcacaaatcaggcggcctattccgtacttctcagtctctgtcccaatgagagaaaggggcaataggcttggcgcccattatccgcacagcaggccttacttgtctctatgtctttacgggcagcgggattatggacccccatgagtcggtacagtgatgtggcatgtgtatatatagtatagcttagatagtcgattgttttgatagagcacttcagggcagtatcaatctcagcgagggctacaaggatataggattgtttctcagtggtttactatagaggtttagaagtagactatagacgtactaagtcagcgccacgggaagtgtctttcctttaaaactgggcagtttcacataagcttaagggggcgaagcatgggaatggctttgtcaggcccgttggtgggcggtgatggcggtgagggagttcggtgctcaaatccccactggacatacgtcgatggagactcagaaaatttcccgtgagtttcagtctgtattcaactgccgatggcacagtttgaagacgataccacgatgtcgtccaaaaaagtaccgtgcgactcatgtcgccaacgtcgagtacgctgcgacggacttttaccttgcggcttctgccagcggacccagcttacctgcagacgtgaatacgtccggaaaaagcgcggtccgaaacatggcagtggaaagaagatagaagcactaagggctgctcaatcacatgtcaaggaatataataatagcgcctgccaaccagtggaggatctcctatctccagatcatttgccacggctgatgagacgctgtgtcgacgtctatctacgtcagatgtacccgatcatgcctcttttcagaccatctattctaatcgaatggctcaatcgaccgatggaaccaaatgagcaaactatgttatttgcgctatgcgcattggtcaccgcgtttatgtgcggtcgcagcgaatccattatcgggtgcggagaatgggcatcagtcgcgcatcggttgatagaaaagagcaattcggtgcggtctgaatataacttcgtcggggacagcactgttttgacgcttctagcatctttctttatcggagttacgcactttgaattgcataatgctcgacaaagttggttctacctccgcgaagctataaccttggcgcaggcacttggcttgcacacggacgagttctaccgtggcatggattatataagcgctctgtactgccgtcgaatttacaacattctgttcgtcacggagagatctttcgcagtagcaagacataaaccggtccttctacctcgcccgttgctttttcctgctcccgggccgaacgatcaactagagggcctagaagaacagccagaaattgacatcggattccgccagcttgtgcacgtttattcgcagatcgatgtcaactttttggacttctggagtgaaaaggagacaatcggcacaacccattcgacatggaaccttttttgcttaaagttgcttccggactgcgtcgtgatgtctgacgctcataaagctgatatctttgtgacccagcactggcttgacctggttctatggagagcggcccttcggcaggggttactttctaccaaggcgggatcacggtctaggacgttttcttatccacaggatattgcgttatccttactacagacattgacatcgctctctaaagagtcagtggcagtacatggactagggattgtatgtgtcacaacctgtttctacattcgcctgagctaaccgtacgtaccagttcgaaaaaatatacgacgtaggcaacactctggctgacttcatgcattgctcaagaaatttgacaggctggacagaggcaatgtcacagaacatggaccgactagactcaattcaaaaacagctctctctaagtccaaactcccacgataaattcgccctgtctctaggaggacgattggctgagtattctattttctttggtagcccttttaccatgtataatttggtcattagagacgaagatgtggaagaccaacgggatgcatacaccctggaatgaaatatttatagtcatgtgtatttaatgtgaatacggtcatcttaattgtggattatgtacaaacatgtctgatcccaaaattctcagttagtaacaaccaaattgttgtcataactaactacttgcggcgaaaccttcgctgaaattctcggagagatcccggggaattgttggcagatcaccccggatcgtcgagccaatcgctgaattgctcgctgaatctctcgctgaattaagtctctcggaaatttagaccaggaatttgatatcaaattataaatatccttccagagtgtgtccaaaaaaactgcatgccgaatccatgccgaacagttgaatcatggcctttccgactaattctgtcgccaaccctcgggccgtcatttctggtccgaaatatcgctttaccattctgaccgatttcttgattcggtacgagtgggcttctgatggatgtttcgaagaccgagcgtcaactttcgccatcaaccggcactttccgacgccccaattccgcgtcgtcgacaacgatggtaatctcgagatcatcgccgacaatttccacctatgttacgataagcaacgattctcccctgctggactgaacgtccatttcaacttcaaatataccaactggggggctccatggcagtatggactcgatgaggagctcaatttgggaggcacagctcggacccttgatctttgcgatggccgttgcgatatgggaaaaggagtgatttccaaagcaggatatgcggccctcgatgactcaacatctatgctcttcgatggagactttgtggcgggtcggaaaccgggtgatcgtatcgatggataccttttctgctacggtcatgactacaaagcggcgatgaaagcattctactcagtgtccggcaagcagcccatattaccccgatatgctctaggcaactggtggagccgatactatgcctatcaccaagacgggtatgttcaactcatggatgagttccgtgcacgcgatattcccatgtcagttgctgtggtcgacatggactggcatctcgtatcagacccttctgtaccccatgccggatggaccggctatacctgggataagaaactcttcccaaatcccaagcagttccgacgtgatctgcacgagagacatctcaagatcaccctgaatgatcatcctcacaatggaattcattcccatgaagatgcatacaaggaaatggccaaagctctgggtcacgataccggggaaaagaggccaattattttcgatccctctaaccccaagttcatgaaagcgtacttcgagatcctgcatcgtaatctggagaataccgcatgcgatttctggtggattgactggcagcaaggcccgtactccaaagttcctggcctcgatcccctttggcttctgaaccatttccactatctcgatcatggacgagatggcaacaccactccccttatcttttcccggtacgccgggcctggaagccagcgatacccagtgggattctcgggcgatacagtggtcacctgggattcgttggccttccaaccggagttcaccgcaacagcgtcgaatgtaggttacgggtggtggagccatgatattggcggccatatctttggaggcagagacgacgaactcgttactcgatgggtccagctcggtgtcttttcgcccattttccgtctgcattcttctgattcgaagtggaattctaaagagccgtggatgtatcgctcggagtacaagaaggtcatgtctagctttatgaggttgcgacatcgactggtaccattcctgtatacatgcaacgttgtcggttctatcgagaatgagcctttagtgcagccgatgtactggatgtttccggactctgatcaggcgtacgtgtttcccaatcagtatatctttggctcgaaactcttgattgctcctattgtcgatcctcgggacaagacgacaaacttgggggctgtcaaagcatggctgccacccggtccccggtttgttgacatatttactggccaattgtatgacgcagaccgggagatcacattttaccggagactggaagaataccctgttctgagccgtgaaggaactatcattcctatggatgccagcccagcgcccggaaacggttgcttgaatgtggaagcgttcgagtttcttgttgtcatcggcaacgatgctgaagccattgttttggaagattttgaagacgatgcacccaattcgacggcaggccaggggcaacggaaatttgctgtccacttcaaccaggctgacggaaagctgaccgccgaatcaatcgaccggccctcgaaattccgatttgtgtcgttgacgtccattccggacaacttgaaaatttactgtgacggcatcgaccggacgaaagaggttaaagtgtccgtcgaggagggctgccaggcccctggtctcgtcattgaatgctcattctccaaaattggtcactgcatcactattgaactcggtcctaatcctcagctcagcgtgatgaatccgatgcgccgtctcgagcctctgattatggactatcaatgtgagttcgagattaaagacaagttgtggaaagtcgtggcagaccacatgaaacgtgttaacgctatgattggcacgctgctatcgcttgggtacgatgactctatcgtcggtcctgtgtttgagcagctgttggcagatagtcggctatgttcgccttttgctaagcggacgtaggccgacggatcagctgtatgcacctcaaagggtcttaagtgtattttgactaagaagttcaatttatgatgcacgttttatcctcagtgtaatgcttgtattttctacaacaggatagactgacgagtaagatcatggtgtctacgcagaaaactgatagaaagatctgtttaaagcaatcaatgaagtatatttgattgcaatctgccatgatgatgtcctctaagcaatctaagtacgagtatctaaagagtaatatatcccagccctaaaccaaaaagactcttccctcaaacgcatgcaagtcctcattgtgcccatctacattgctagccaacaatttccaattttcgctcttcacggaatcaggtttctcaaacttctgtgttgtatttgagaagttgagaacaaccaaaatggtctggttgtgatttgtcttagtataggtgaagacactctgatttggctcgtcgaggatctcaaactctccaaagaccaggagatcggcatactcttttcgcagctgattcatctgtttccagaaggaaagaacagaagatgagtctttctcctggagcttcacattgatctcagggtaattgtcatgcgggcgcatccacggctttgccgatgaggccggtgaaaagccagcattggcatcagcactccactgcatggggagtctggaatgatctctcgccaaatactgcagagcatccatcgccttgcttaactcggctgggtctttgccggatttttcgcttatcatccgataatagttgatgctatctatgtctttgtattcgtcaatcgtccactctcgaggcgcgttcaccattccaatctcctggccctggtagataaactgcgtgccggagagagtgctttgcatcatagcaagcatctttgcagaccgaaccctcaactcgggtgtcttgtcagagccgaaccgactcacagaccggccctggtcgtgattttccatgaacactgtggtccatgcatcagtgcccttgatgatatcttgtgtatttttcacggcggcttttagttctcgtagattccagcccggaaaattggtctggaacttatagtccttgccctggccgaggtccacgatgtcgaattggaagaccatgctcagctgcttctctgccgctgagacatagctcagaaccccttccaaggtatgcgtgtttggcaattcaccaacggtcattgcatcgtatttggaaagcacgtcgttcatctcgcgcatgtactcgtggatgcgaggaccgttgcagaacagcgagaaagccggttgtgtgtcggactttggatcaaggattggagcattgggatagtcggggtgcttgctgtacatgttgaccgtatcgacgcggaagccatccacgcccttctgcagccagaactccatcgcatcctcgtagactgccttgcgagtctcggggttctcccaattgagatcgggctgctcaacacagaacagatggagatagtattcttctgttgtctcgtcccactcccacgcactgccaccgaaaatgctgcgccagttatttggcggctgacgatttccgttcgcgtcgtatttagctggcttccagatgtaccagtcgcgcttggggtttgtctttgaagagcgggactccttgaaccatttgtgctggtctgatgtgtgattcacgactaagtccaggataatccgaagtcctcgcttgtggcatgcgtcaatgagggtatccatgtcctggacagtaccgtatgggccatatacgcttttgtagtcggcaacatcatagcccatgtcaatctgcgggctgtcgtacatgggacacagccaaattacatccacaccaaggcttgtgatataatcgagcgatgagataatccctgggatgtcgccaatgccatcgccattagaatctttgaagctggcggggtagatttggtagatgatggagtttttccaccacttttcggccactatagagggagacatggtgaatttaagggatttaaatgcaaggaatagtgatagaagaagaaatataggtccaaaatacgaaaaactggggaggctatatatacgtgtctaaagcattcgatttttgattgtcattgcactacctgctcgactatggagtctccgatatcacgtagggagggccattgctctcattgactcgatgtcgggccgacgatcatttcagcagaatcatgtgcccctcatctgcctgcgggtctttctgtgctgaacgagggttggtggtgtttcagtatggtagagattcccacttaatcccacgatccggaaagcataccgagctctccaaccgcctgaccatatcagatgccgagattgtctatgccgattcgtctcttctttctgggcctaactcacaatgcgttagttcatcgcagaaatgaggggaacagaagcatgtcgggccgacatctcaccaatgatcccgtgatatcccccagccctatctaaccggatcgggaaaagcaacagccctaaaacggccataagaaacacgcgagacacggctggatgaaaggagccaatgcggtgacaggactaaatgcctcttcattcctgcacggcccgacatcaggccaatcacgactctcccagaaaatccggggatagtgggccaacctataccccatgctggtgcagagaaaccggggaaagtctgcacgcgccacaactatcgcatgtcaaatggattaagcaagaattaagctcgacggacgaatgggccaatggaacggtcctttcgtcgctcgttatggactactgtcgacgaccattagcagcacggttttgcatataaatgcccaacgacgcccgcatggaatacttcttctatccagtcctgtccaccttgaacaacaatctgaatcatactcagagcctccattggcacatctcagcaatggcttctgaaaagcaagccaccgatcatgtcgagacatatacagatgtcaagccgggctacacagacctccaaaccagcaccgaagcccacgccgccatcgaaaaagaacacaaaatgaccgccatggaagccctgcgactctactccaaagctgtagcctggtccctcctcctctcctgcgccatcatcatggaaggctacgacgtggtcctgatcggctcattcttcgccttcccagccttcaacctgaaatacggcgaactcatgtcggacggcaagtacggcctcgctgcctcctggcaagccagtctgaccaacgcgatgagctgcggccagatcgtaggcctctttgtgaacggcatcgtctccgagcgctacggctaccgcaaaaccctaatggcctgtctagccactaccgtcggcttcatcttcatcctcttcttcgcaccaaacgtccagactctcgtcgccggcgaactgctcatgggaatccccctcggcgtctaccagaccctgacagtcacatacgcatcagaggtatgccccgtcgcactacgcgcctacctaactacctacgtcaatctgtgctgggtattcgggcagctgatcgcttcaggcgtgctaaggggtcttgtcgcacacaccgaccagtgggcgtaccgcatccccttcgccatccagtgggtatggccggtgccaatcttcatcggggtgtacctggcgcccgagagtccatggtggcttgtgcggaaagacagacgcgaagacgccatcaagtccgtgaagcggctcacgcgcgcagaccccaatttcagcgcagaggaaactgtctcgatgattgtgtatacgaatgccatggagcagcacgctgagactggcgcctcgtatattgactgctttaaggggaccgatctgcgacgcacggagatcgcgtgctgtgtgtgggcggtgcagagtctatgcggcagtggtctgatgggatactcgactgtcttctaccagcgtgctgggctggcggacgagcagtcatttaccatgtcgctggcgcagtatgcgattggggttgttgggacgtttagctcgtggctatttatgacgtactttggtcggcgcacgctctatgtgggtggcctggctatactggcggttatcctgtttgtgattgggtttgcgtctgttgcgccggcgactacgtcactctcgtgggcgacggggtctatgctgcttgtgtatacgttcgtctatgattcgactatcgggccggtgtgtttctcgctggtttcggagatgccgtcgtccagacttcggacgaagactgttgtcctggcgaggaatgcgtataacgtgcttaatctggtgaccgggattattattccctatatgctgaatgtggatgcgtggaattggagggggaagtctgggtttttctggggtggactgtgcattctctgtcttgtttggtcgttcttcagacttcctgagcccaaggggcgctcttatgctgagttggatgttctatttgagaacaaggtgcgcacaagggagttcccgtctgcgaagacgggtttggtgcagagtgagctcgaggggacgaaaggctctgtttgaggctaatatctgagagaagtattggaagcatagtgacatgtagtatcgtcagtgaaatgaaatctcatcttgttgtaaccaactcctgagatctttgaacgccttggtagagaatattataactagaagcccatttacgaagacggtttctttcaaaacttctaattctgctaggaaatgctgttcgtacacaaaagaatatttgcaatcaaaaaaaaaaagacaagaagcagatgagtataatcattagaccaggtatacgccacctatgacattgaaacaaggaaacaattttttaagatcccagtcaaaaactgatatatcagttatccaccaagaacttcattctgatacccatagctgccaactcgacatccaagtagcgcagcacaccaggcacagcaacgatagtaacattgtcaccaccgacgtagcggtgaccatcaccatcttcccaaacctcagcacgggagtcatcgaaggtagcctcacgggcacaacgacggcaacgcacaacaccattgacaccgccaacagcaccaatagcagagctagcatgagcattggtgttctgctggttaggagcagccttggcagccgcagccgcagcaccagggttgatagtggtgcgagaacgggacgagccggaaacagcaacctgtgtggacaagaaggacccacaggagcgacagatccaggtgtgctgggcgtcagagcagttcatgagacgatcctgcagcaagaaggccgcaccgtgagcaatgagcgaatcacgctccatctctccgacacggataccaccacccttcgcacgacccttcacgggctggcccgtgagcgcgttgacgggaccagtcgtacgcacttggaacttatcgttcaccatgtgacgcagacgctggtagtagaccaggcccatgtaaatgtcggcggagaactcacggccagtgacgccactgtacatcggctcgttgccgtagtagttgtaaccggctttgcggagctgctcaccgaagtagtcggttgcggtgttttcttcggagaattggaagggagttgagtcttgcggtagaccgtgcatggcaccggcttttccggccatggactcgatcatttgagcgattgtcatacctaggatatgttagatgggaataatttgatattatgagcgatgggagcttacgggatgggaaagcgtgagggttgatgatcagatcgggctgcatgccactctcggagaagggcatgtcgactgcaggccagagttgagacaacacacccttctgaccgtgacgagaggagaacttgtcaccaatgacaggcttgcggggaatgcggtacttgatactgagcgattgagcaggctcgttgccagactcggaaccgatgattcggagactctcgacgtagccttcctcggcatccttgtatttcatgtaatgggtgattccatcgacgttaacgtacgagtcggaggcgggatcgaatcgcacactgtgccaggccgcgatcttgtcaccttccttgacgcgagcacccaggtgcggcatgccatcttcgtcgatgatgttgcgcacctgctctttgacctcgtcgccgggggcaaatccaaacagcttggtgacctcacgcttggacttattccgacgggagtcgttgtcggctaaagtgacgaccttggtcttatagactgtaccgtgaccgaagccacgttcatgtgcggacttgttgataatcatagcgtcgtccatgtcgtatccggtgtaggagataatagccacaactgcgttcataccgttggggaagttgtccagaccgtaggcgttgtagagaggtggtcgcacaatgggcgtttgacccgtttggatgcggtacaacttgttgtcagtacggtgagcaatcgaggtacctggcgtacccatggtttgtttgctcatctggcactggtacatgttacgtggagattggttgtagtcggagaagggggtcatgttcgcgacaatagagaggatgttcgtgggcgtgaactcaatatgggtcgaaagaccgggaatcaggtcagactccacacatgcaatctccatgaaaggctgctcgaacggtccgacgtaatccagcttatccagcgccaaatacttaacagggcggtacattctcgctgattgggagaacatgtagacacctgggtattgtccaccgcttgagttgggaatatatccaatttccaattcacgagggatgttgtttttgccttcgaccttccagtaccggatggtatcggcgattctctgggcctgcttgggtgagcagtaaccaatgattcgtccatccaactggacaacaacgctctcgtccagagccacggaggactcagaccggacaccaagttgaaccagagtccgaggcagatcagatacatccagattgtcagtagaaatcaaacacttgtgcgacaaatggttgagcagaccgcaaggcgatccatcaggagtgtggacagggcaaaggaaaccccaactttccggtagtagtttgcggacagtggtagtcttcaactgggcgaagaaactaccacggtgaatcatgcggaaatgactgatgaaacggtagaagttgatcttctctgcaatgacggtgtaacctgaagtttgttgcaaatcaagaccagtaggactgatcaagttaccggtggagaggaagtactcgagtgcattaccaatattctcatttgatctcttgacgatcttagagaggaagtcgcgctcaaatgcttcatcagtgaaccttgcgccgttgttgcggatggaccagtctctggcaatgggaccgaatgaacggagccactcctcgatacgttccttgagaatcattccgtaaaggaaaccaccaagcagaatttcctggttggagacggcatcgggattgtcgggggcacagtctcctgcaactgtagagtaaagcttgcggaccataaaggtgatcaacttgaacttgtcccaatcttgcgcctcggtgacatgctcatttccaagatgagggagaacaaccttacggaggaactctgtgccaacttcctcgtcaggcatgtcagcggggactccgagtacaggtcggaaagccttgcccaggtgagatcgacaatcgtactggctgtgcttctggtaggcgtggtaggttctcaacaaaagctcgacacggtccgtgacgaaagtgttgttcatgcccttggaagaagcaccaccgacaatggcctcgaagatttcgcgatcgttagtctcggcgagtgccttgagaatcatcatcacggggataaggtattcattcttgcgccatgagaaacggaaggtgacatttccgtcggagaggtagtgaagcacgtttgtctgcgacgtttgatcgggacggaccgatcgtatttgaacaccgaactttgtgtaagtctgcccacgcttgacgaaagaattacgaatgatggacatggggtagttgcgcttgccgacgaccagcatacgaatgagcttctcgttaccgttaacgatgtagaagccaccgagttcctccgattcttccttgtgtcgaacaagctcctcgggactagcatgttcgaggtgacaccggttggtgcgcaccatgatcgggacattacccagctcgcggatagactccatccagtctccattgttgacctggtactcgaggcgagcgcggagcttgccacggtacgtcgagtggcgctctctgcattccgaggggtagatttcacggtttcgggtggtgtacttgttggttgggggcagggtaggcttgtcgaggaagatttcacgcacgcggacgttcaagcgattccgcttcggtgggcgaacgccttctgattggcgggccttcttctgctcataggtctcgagttccccatcgaggaaagtcttggtaccgatatccttcaatcctgcctccaggatcttgctgtcttcgaagagagcattgaaggaatcgatatgcggtcgaatcgactcggccagcgatggataagccgtgtgatccgcgggaggattcttgaacaggttctcccgtcgcagggtgtcgtattcgactgaccactgagtgtctgtggctgcgggcgccatgatggaaattcgcagctcttaaaagtcggttgatgcggtatagaaaagaaagactaaacagcacaataaatgtgacccttatatgtcaagataaaagcgcgacaatatcggttctattcctccgcccaatattgtatcagccagaccacaggaattgaaccgacaatggcagctgccaaaagacgagagatgtctgttctgcttggggaaatttttcgagggtggagccagacgcttatcggcacgtggtgatatacattgttggcctgaggcgcccaaatgaggttcaagtccaaaagttcgacgttcaccgttcattaactccctaatgccgtactgaaactctagtttgactgcaagctcctggcatgattatgaagccctaatcccagtagactctagattgatcaaacttgcaccactaactgctagaaatgtgggaacttgtaactacgccacacgggctggctatgctgcacaacgccattcaccccaagctgaagccaatggagactaagcgccctgaggtcatgtgtgtaggtagatcggccacttctccatagacaaataggacgttgtgtagatccaatatccttttctattgacatctgccggcggttatccccttaaaacatcatttcctctaataataggccttttaaattgtgtcaggttgattttcttgcaacggtgtggcgatcttgttttctctctcttctttttttccctctttctctcacctttcatctcttcgtcatatcgagacatcaccaaggatatatcaacctgttgtgcagttacaaggtcgaccccactctctggcttttgtcatcctgagctttttccacacacacgaggcaacttcctcttaatttctctggcagctttcttttttttagttctattctactgtattgtctcgtttctcttccctcctttttttcattcctttttcataaagtttcgcctctcttcgtcatggccggtatatttcgtgctatctatgactggcttctgaggatgttctggtaagtgggccgtttgatatatgcagtgttcgggtgaccacggcccgtccccgcagatgaagccctgctaaaactccatacagggccagcgagatggatgtcaccatgatcggccttcagaatgccggcaagtcttctctgctgcgtgtgttggcggtaagtcgatctgataaagtcctgacggggtgttgctgaccataacagggtggagagttcactatcgagtaagttatagatggtctcacatctgagatcatttcatctcggccatgtcctgatcgtcttccttgtagctccatcccaacaatcgggttcaacaccaaaagagtgcagaaaggccatgtgaccttgaaatggtatgttcatccttcccgattaagcccggcggcgctaatatatccctcgcagctgggatctgggtgggcaacctcgatttcggccgatgtgggaacggtattgtcggggcgtcaacgcgatcgtgtaagacttcctgctttccccgtcccatctcttcccggcatactaaccaaggtgaataaaggtatatcgtggatgcagcagaccgcgctgcactcccagtagcgacagaagaacttcacgacctgatgaaaaagcccacgctggatagcatcccactcctggtcctcggaaacaagtccgatcttccagacaagctgtctgtggatgagatcattgaggcgatggatctaaaatccatcacccatcgcgaagtaagctgctacggtatcagcgccaaggaagaaaccaaccttgacgctgtcctgcactggctcattgctcgagctagccggtgaggatactgtcgcttgtgcctgcccgctttgaccttcaaccttcaacctcgactcgcgatatcccttttgtttttcatacccttaactgtgccgcattttgattgtgttcatatcccgtagactccagcgtgtttggcccgcagcctcggatgtaacgatgttgacgatgtagtcttcttttttctgctcatggattctcgagttcatgattatgatgtatgtatgttaatggtgatgtgcgcttgtttgagccttcttttttcgtatcgttttttccttggtcgctttcttcgatcgataagtattagggtgttttggcaatactcatgggggaaaaattgacagaaagtcgatctggggatggccgacataaataaacaggggccaccccggcattgatgcgttggctgccaacgcatcgatgcagacgaataaacctccccgccaatggacgtctcacattaaacacatattgattagctgagagctggaataataattcattgtaaatcgttcggatatcattactggccactataccatacatctcttttcgtactagtgtgcaccttcatgtcttggatattattctcagacaaatcaaatcaagtggcattagtcgtacacaaaatatctagatcagttttgtaggtccttccttgcagacaggccagatccggagttgctcaaaaccccctttgaagcgcccaagatagcgcagtaacgcccgtaaacatcaataaacgaaaaacctcacgagtgaaatgcgaagaagatatggaatcatttgcaacgcttctctacaatgttcggcccatgctcctcgtactccttcttggatatccacatctggtggaaagttcccaaactagccaggatacttcctccaatccaggagccgaagcgtcgctcagaggtgttaccgggagcagtaacacggaccctggggccagggaacatttgcatcagctcgtggtttagacgatcagtgaagccataaagcaagctggatccaccggttacaacgacattagccagcaggtggggacggaggtcgacgtcaacgccggccaaagaagccttgacaagttctgggatagtctgagcgggtgtcgggggagggaaagccgagtcggggtctggaatagcagctttggcgtcgaacagagattccactgcgcggaaacggtcaacaccgaagacttggttgtatccatcagggaactcgaatggacgaccaggggtagtgcgagccatgtcttcgttagatacgcccgtagggctgggggctgagagcctcgtaggtcctggccaaacttggacgacacattccttaaactcggacagtgtacgctcctcaagcagagcacggtacgacgcatcgggtgccttgtctgcggggaaggtcttgtatttcacttggggcggttgtccggcttcgacggccgatttcgagctgataaggtaatgcggcgtgattgtgatgggctgtggggagttggccttgaaaattgccttgatctgcgacgagatgtaatcaccgcccaacggcgagtgctgcacaccccgtttcaggatcatgccatcgtggatcggggtaacagagatgttagaagcgccaatgtcaataacaagggcggaggccttgccggaagcgaaactgcgcatggaattgggtcagcaagtggtacacatatcatagttaatgggtggtatacgtacgcagcaagaacaccagtacgcgcgagatagaaggccggtgtatcccatttttccattgcgatttcaatggtcttttcgcgtgccttggccgggttccatccaggctcggtcatcaacaatgggctgtccgacaaaggcttctcttctgactccacctccatctccgtagggagctcgtctgcagaaacgtcgtttaatccgttctggaacgggttgcccgctctcgttccggtgagtcgcgaaataaatgagtgctcccacactttctctgccatatcccaatcttcgacgattccatccttgccgattgggttgtagatggacagaccgggtcgtggggtaacgaatatgtcgtcgccaaagacgagcttctcttggccgtcggcgttgtattttccatagtaggttggaatcagtgacttgggagcatcttcaccggcaaagcccgcgcgagtggttgaataccccgggtctaggacaattgctgacacctcgtctatagtcgcgcgataattagcatctcgtacggtgaataggatggaagcgttctgtggaatcgcagcggcaggcgcaattgggatgggatatctgggatcacatacctccaccatactcggcagcttgaggtgggttggaagggttcatcgcgaaagttgtgcaggtatatctagaggataagggtcgcagctgtcacaaggatcaacgtgaatattttggtttaggtcgcctgaagaaagtcaagacgtgaccatgtgtatcgcgcagacaactagaggggctggttggaggcaggagaagggcgggtctttttgctgcgggtggtgtagctttggctttggcatccaaacgggcagttcaagatcaggcttagtcattccaggtgagcagctgtgctgactaatcagggccacaggtaactacctaaacagagggctttaggacattatgcatggcccttcttgagtcacatcctttttatggttaaatattgaaagtgcacatagtatttctttgaagacagtgtcttatacgagaaaatagagataaactgatgaggcggtgtacataatccgaaatgaagcaaaaagcatctataccgaagaacctaacgaacaagatatcattctatttccctccttttgcttgtgtttgtttctcgcatctcggtgtccttatatgttacttcgatgataggccagaaatagcattagcccgggattattacggtatcatacatgtcgagtaaaaacacacgccgcagagggccaagtgcataaaagtacatatcaaagaaaatcagccgtttcagatgagaataacaatcatttctttcccgcctgtgcttctttctctcgcattgcagctcttgcactgcgactgcctccaagcttcggaccccgaggcgcttcaacattagccacgggttttgctgcaggccgagtccgacgccgagactgcatcgcatccataaagtcgcgcctgaattgctcagcaactcggtcatcagcagcttgttgatcatcaagctgtgtttcctcttcttgttcatcatagatttccactataacagctagtgttagcaaagataaagatcctgtaaaattcactttggaatgccacgtacatttgctctcacgtagtacctcctccacaagacgatcccttgcgatgtctgcatctgtcctctgtttgcgattgcgccatgacttgccgtctgggttagggcgacccgtctctggagcagtatcaaccgatgtcggcaagcctccattctcagtcatttgtcgagtcgcagcctctgttcgcgcaatgtttcgcaatgtggcttcttggccgaggtcgatttcatggagtttgcctagcgacgcaggttcgcgtgtctggtgtccaggtagcgacaatcccccggcaacttcctcctgggttggttggttggaacctgaatgatctgcctttgattcaggctggtagcgcttagccatctcggaatctatgaatgccatccttatctcgttagtccacaccaaacgattcggacgatcagccgcgggaaagaatccgtacatgtgtttgtcaacatccactgtttgaccagtatatcccgtgaaacgttcattcattgcttgtatcttctcgttttcagtatctccagccactggtactagcgctagttgctggccctgatcatctcctagccgtgacgcggtagaaaacccaatgccgccctttcgaattgcgcgtggacgccgaagattattgctccccagagcttgtgacgcgccaggattatcattttgattatcggcctcttcggtgtctaggatctcatggtcgggacgtcgtcgcatgaacttgcgcttttttgctgggcgaaacagggattcaattggcatagtatcttcctgcgtgtccattgtgatttgcgacaatgtaaacttgggtggtaggggaaacgagcgggaaattgattgtcaaaggtgaggtcattgagcaggcaaactacaattcgccgattattgaccgccttctattctgccaaatttaggttcaaactctaatgtgacttggacctatacaacatacaccagatgtgatgatagccaataatctgccctttccatgactactaccgtgatagaaatggaatatccaatcacattgatcgtaaactttatttttctcaaggacgttgatattagaatacattattttgctttgatcagttccgattcatatatcttttcactgattcataatatagcaagggaaaaaccgtctaaatttcacaatgtatagccattcaaacaatccatcttacctggtcacgggcctggatgtcatcgttttgcggttagagcctctcaaggctatatcttggaaagaggtcgccaccaaccttggaagattctctgtgtttataaaatccacttcaattaactagccagagccagtatctcaaatcgaattaaccgaatagccatggtattacccagtctaactaatagtatacctgctcccaatttattacaacatacttcatatgtatttgccttggacagaacgaagactctcatcaggaggcggctgggataataataacttggctttttaacaagcaatttggacatactaccccatatttctttcatagaagagccgggagcttgtaacgggtgatattgttttaggttaaccacagatgatttgagacacgtaagtaatcatcgaaatgaaatgaatctcgggaagtcgaatctcaaaatgccgtgctccatagttaaacgtcatctaccactaatactactactactagttagtgtacctgatttctatatgatttttgcacacccctaattcctcaccgcactcaccgcacacctatttaaactactgcggataaggcgctccttagccagcatttttcgccgaatctgtaatttaatagttaattttagaaagctgttcataccatttctaagcaaaatgcatttctttttactacgtatgtgaactaggagtgggcagaatacggtagaaaactctaccggcatatgtcgcacccgatcaggaaggcgatgactgaattttcaggcaagggggtggccataccccggataatatatatcctagcagctgcttctgtactattgttcagccaatatcagggctctaaaggtgagatctcgtaagagacagttccctagttatagaaacgacaatagtgatatcatcttgtttatatcacgggtgtgtcacggactattttctaacattaatgtctcagattgctcgtttatctctttccagtaagaattaggtggcaaatccatgttctgttcagatcctttgtatattctgttattcaatcctaatcctacccgagtgaagaatctagtcacatcattacatgtaggctcagatcaggaggggatcggcaagggttcacaaaagatgtggctgataggatgaatgcgaagataagcaaggccgtgagataatctaactattgtaagtcacgatccgtgcgtctggtacagagtacagagtaaaccctaagattctcacgggagagagcttgctagttcctcgaaaagacctccgcacgacccaaaaaacccagatgaacctagtctgggctgggtttcgggtcgtgtggaagtctagctgagtaataatatgttgaagaaaagaagaaagaaggttgcttggcaatcctcagaatttccgagttcgggagttctcaggcggaaatcgtattccgtgatataagttcttgtccaatctagatactgcatgataatacatccatcgtatcaggaacatgaccccgggtaggtcggatgctttctggcctaatcaaggattggatttgatgaatgctgcaaataatcaaagtgtgcagcacaccgctggagagaaagccgagaatacccctaggttagggtggctggtttgttgagacacgaaggcatccgtcgcacgaagtacggagtagatgctagcatgttctttagggaaacggctgacagacgtttgctcaattcgcccatttggctattggccaggctttctacctcggtcatgaatatctactccgtattagaccccgcaaataatgttgaaatctctgactgtttgtgacccgaatccgtccacggtgtggagggatcccccatcttgccccggtcttgagctcaacaatattcctcggacatctctcgggaaaaatgtatccaccagagaataatgcaattgttatacggagtacaacatacatcgcaagggatatcgtggcttgcctgactagatcgagacttttattttatttttggcaaagtttcaacgcctcaatgacacaatctcgcacgatctggagggaaccttggaagaaacagtcatcaaaacagagcattttaatttgtaaagctttgtgatgtggaacaatgtactccccgacaaatccttcgattttaattaggcgtgcctgtactccacgggcaaatccggagagtgaccgagatggtggggtgcatgagaatggaaaaaccccagcctggaggtgagattcaaggtcgaggttatgaagtcttggcacttggcacttggccggagtggataagccttcgggactagcccaagcctttcaatgccgaggccggcggtccgagtcaggcaatgagctaccaacacgcgagaccgaaaagacccgggatattttatgatggcatttctcggaaaataaattactccaaacagcttcatccctacttccccattccatgtggcataattcgagcgagaaatcatggggaggatcggcaccccgtctgggctccgatattcggcatttcctccaatcagtccgggcgagcaagccagatcatcccgccacttaactcttattttcggccccaagcctcgtggatctagtccggaagcggtttcttcttcgggagtgacgaagctgcgggatccttttacaccgggaccgggaccacatctaccccgtggagtcggcgatgtgaccgagtcacaggacagaaccggtcacggattttattgaaatttgcccaaaacttgccacggtggatatggatatgctatccactgtggaattcccccatcccacaggtacaggatttcatttttctgatgcggggtctccacgagaagggttgaccgaaaacagggtataaacccatggagagaccggcctccattttctctctgtttctctcatccctcagagtggcctttcacatacacactctaacatggtctcattattccgaggaaaagcgctgagcgtagcgcaggcgttgctcattgtagcaccggccttcatcgtcttcggttacaaccagtctggcttgggccctcttgctacattgcagagctgggtcgaagtattccccaaaatcgacacaatcaacacatcgggcgcccaacgcgcgcaaaactccacaggcaagggtgccgtcatcggatccttccagctcggtgctctgttcggagccttgtcgtgtacattcctgggtgaccgcctcggtcgccgcaagaccatcttcttgggtggtctccttactatcatcggccaagtgttgcagactgcggcttatggcttgccacaattcgtcatcggccgtatcatccttggtctcggtgtcggtcagatgagtgttgccgttcccgtgtggcagtccgagtgcacgtcagccaaacatcgtggacagcacgttgtcgtcgacggtatctgtatctgcttgggttatgttctttgtaactggattgattttggcttgagcaaaattaccggcgcattgcagtggcgtattccattggccgtttccatcttcttctccgtcgtcgtcgtgttttcgatcttcttgctccccgagtcacctcgatggctcgtgcgggttggccgtatcgatgaggctaccagcagtctcgctgcctacaagggtctacctgacgatgatgaggctgtccacatggaaatcgccggtatcgaagcttctcttgagagtacggttaacagcgcctccatcatggagatcttcacatccagcaaggccgacgatgagcgccttatctaccggttctgtctatgcgttgcactgcaattcttccagcagatgtgcggtggtaacttaatctcgacatacgtgtcgacaatcttcgaagagaacctcaacatgtccagcgacctggctcgcatcctgtcttcatgtgccatgacctggaagttcatctgcagcttcatctccttcttcgccatcgaccgactcggccgtcgaaagatcttcattatcagcggtactggtatgtccgtctgcatgacggtcctcaccatcaccaacagcttccaggacaacaaaaccgcatccattatttcggccgtctttatcttccttttcaactcgttctaccctgtcggtttccttggcggcaacttcctttactgtaccgaagtcgctcccatgcgtctccgtgtcgccatgtccgccatctcgaccggaaaccactggctgtggaacttcgtcgttgtcatggtcactcccgtcgcactcgacaccatcggatacaagtactacattatctacgctgtcatctctgcctgcattccagtctcggtttacttcttctaccccgagacaatgaaccgcaacctggagtccctgaaccatgtcttccgcgatgctccgaccgcgtgggatattgtctccatggctcgtcacctgcctcaaggcgaggctgctgaggtggatgtgtggaccgggaccgatgaaaagggcgagaagagtgaaattgagcagaaggagaatgcttgaattataaattaaatttgtcgagaccttaccaactgtatatactatgtctgacgatgatgatgatagaatgagttgtactaaagtacaatttaaataaatgtgatcattagattgagcacatcaagaatttcatgattccatatttcattcatttcccttggatctcctataagcaccgtaagtaaatacaatccggtctctgaagtactattgctcctaagaacttggcgtagtcaagtctcatatcatcccaaattgggagattaaacatagttgcctctttcactatgagacatgatatacatagaggttatgcatctcaattcaacataatgaattgtttaagtttatgtgaaaggtggtattgataacccttttaagaacttcaagtcaagttctttgtctcttactctatctataaattgacatactatgttattttcattgatatattctcgttcccattgtttagccaaggttatccgctctacttcgagtttctttgtctttcaaggctacgtttacatccctcgagtcttcaaggtgttgttgattgttcatcctttgttttttattctttaggccgatttctggtgaattggtgtttgatcacgacaaaccttgtaactaacattaaacccaacaaagagcattcaaatatccagtatcagctatataatccccctctgtatgtctcctggtcttcatttcaagctcattatccaacaacagcaccaaaactccatatatctgacttcaattgtttgagttataccaatttctaaaatcaccaccaaagatgctcaagaaaatccggcactcgctgagatgctttccaagacaccggtgtgactgtgacgatgacagtcaatgctcgggagaccaatctaatcacccacgggcaagggtaccaaagcgcgccctgcgtcaaccacttcctaagaatgctgcgaaaagcgcggctccagctaaccagcctggtgaagatggcagcgaagatgaggatagcagcggtgattatgatccccaagctcccccgcccagcaacgttcctctgtccaccaagggttcgcacacaggcgtaacacctgcgatgagtgagacaaatcttgatgagtcttcgtctagcgatgacccatattccccctcaaccagaaacccctacacaaacagcccgggggtaagtgatactggttcccacaaaccttcatctggcgacgacttttattccgtcggaacaaagaattcacacacaggcattagtctcgagatgagtgatcccaaccccagtgagtcccaatatgaatcattttcagattctgaagaaagctcttctcccctgagagcgtctggtataagtgaatacaataccgatggagatgactataatggagctgacgatgaaagcctcgacctagatctggatgaagtaatgtacgatgcggaatactccagcggatggtcgagcacttctagcgacaggagacgccggcgttctctagatagtcaagcgcaaaccgatgctgaacacaggggtctttatggatccagaggcagtagcggcagcagcaaacgccagcgtcttgacgactcatccgacactgcaagcggtagagtgagaaccggcatcgaactgacagtggaggacgtcaccaggtacagaaataaaggagcccaataccaagcatggattgacgacccggaagagccagggtgccaaatccaaccggcaacattaaatatagaggagatgattgataaaaaacaacaggtgccttggaaagtccatgaatcttatttcatagccgagcctatggcactacaaggcggcgatgttgagtcgatgaatattgatcgaggcggtccgcgataccgctacacacacctccgacaggatccggggccaaacacactcgaagctaacgaatttgagcatcgggttactcggggtattattattgccgagagactctatagggaagacggtcctcattggaatgaggtcgctcgagcccaatacttgcttgattttaatttgaatactctgaggtatgttgtctttactgatatcgggaacgaagaaacaggtccatatatacgacacgaactataccctagattgggtgttagatggtcacaggcaagagacgttgagtgtatgaagtttgagcatggtagtgctgagtatcaagaactcctcgggacaaagttgggtaaagctatggcttgtcttatcctttcttcattccctaggggtacgatgaagatcactcgtattgccacttggtgtaattcgactgcgccgcagatgcggttcgagattgaacctgttattgctgcatgagatatatgcatatatttgtgctgatatttgattatttagattgttgttagagtcagaaattgagattttactaaggcccctgctgtaatagacaagataggcattagttgggtcattcatacaattgggatgacttccaagctgaacaataacctgaatttgatcttgaataccgtcctgtaccatacataagctaactcattgctttgaaaagaaaaaaagaaaaagaaaaagatatacaattaataatagtcatgccttgcacagaagttcgagtccgatattttaggaactcgtgagagatgctcaagcgaagaacttatacaagaatgaagacaatcactgtcacaaatagcaaaaaagaaaaaaagaaaaattgaatacatgagaattggaaacaatataccagcaccagtatcatacggcatctgcaatgataacctcggcagccttctcactgatcatatagatgggtagggcgatatagtaacctggaatcttaggaaagaccgaagcatccacaacacgcaagccgtcaaccccacgaacacggaagtccgcatccaacacagcctgaggatctccatcttctccaattgcagcagtacagcaggcatggtgaccccatgcctcttttttaatgaagtctttcagttcattctcagtagtgacattgggtcccggccagacctcttcaaacccgccatcaaggggaataaggtcatcgaatattgtgcgggagaactgcattgcttcatatacagcctgcaggtccttgtcatctgcaccatctgtggtcactccggtatcgaacgagtggaagttgataaggggcatgtcacgcgggtcggtagagcgcaactcaactgtaccagcgttattgcgagagcgcgactttaacgtaatccaggtccagtgctgggcatctttgagaccctcgtaggagtagttgggataatagccggggaagttgacgggtgctcctgagatcagtaggtcgggctcatcttctgcaacagacgacttgcgaatgatggcgatggcgattccattggtggtatatgtacctttgaacaaaggattgttttcatactgttccaaacaggggtcgggaagagaatacaaaaaggtacacttcgatgtgaggacgaaatcggtgggtgacttgcccactgtacctatttcgtaccgatcctgaagattacgaccgacgccggggagattcaccagggttgagattccaaatttggacaactcctcctttgggccaataccactcagcttcagcagctggggggtgttgaatgagcctgcagacaggatcacttcacgagaagcactcacgctacccggtgttccattagacgatgtctgggaagcccgggggtctgcacggtagaggctctgtcctcgaagatagtcaacaccggtagcccgtggcttcgctccggtggtatcgaaccggagcttggttaccaaggtgttcaactggatatcaaggtgatactttcgcgaaccatccgagtttacagcattgactgtcttcatgaggaattctcgaggacctgtccgcttatattcggggacatctacggcgagagggacttggtatggaccctcctcgtagtcacgcgaaggaagggggttgttaagatcacgcagcagaactcgggcgaggcccgtgaccgtagtgatcagtttgcccagcagtgtttgacccgcggcggtcgcaccggccaggatcaaggacagaagcttttggtcttcaatgacaagacgcaggtctgtgaggctcgttgtaagccatccgtcgaatccgtggcctatgatgctgctgggaaggtatcggttgcgctctagtctctcgaagtattgtcgcatattcgaggcagaccatgaatcattgccagtgagactggccagttgctcccagtcattctcgtacgggtagatcgtgctataaagatactggtcagtatatgatagatacatccgatagacatgcggagaagatatggctcacatcatggcattatgagcagagcatccacctaaagtaccggctcgagggtataaaattcccaaaggttcagacccattgggcgcattgcttccaacatggaggtcaccagcaggtgtccggtaagtcattttgctgtcttcttcctgacgagtcaagttcgagtagtgattcacgaaataatcccatctcatcggctcgtattcggtggactggagctgcagagcggggacaatttgctgagtcgcatttccctggtcatctcctgcttctagaagaagaaccttgtagcctgcaatggccaatcgtgccgctacagggccacctccggcgccagagccaacaacaacataatcatattctgtggtggagttatccgaagacctcctgtgtgcatcatgatatcgatgatccggtctatgatcactatattatgttagttttccgtgtcaacaaggtctgggtagagaccgaaggtgcacctacatagctgagacaattgaaagagtggaaaatagcccaactaccacaggaaaacgcatagtgaaagaaaagggcgaagatttaccccaaaaatagcaaaagaagagaaataaaaatggggtcttcagccagaaagaaaagaaagaaacgaggaacttgggttatatcaatggtcacaaagctcctctcctgactctattacaagggcatagaagcaaaagcaccgcggacgcccatagtactatattcggccagctactgggtatattccttcattgtccttgcaaaggcgatcgacataagcttccaccttccaaattagcctgtatcaggcatggatactcaccgcaatacacactaatcctatgatccttgtacgtagggatggctctgactcgtaccaactagctccgaacgcagccgggtcttggcgagacattgatactttggcttgtgggaccggccagccaatcaacttattctagatcctgcgcactcgtgctagcctcttagtgtcttctctgtgccgtttgacatgccgatcatacagctctctgaaaagccaccaatctaacggtgaagctagtcttctttgggttccaggttctttgttcgttataatgatacagttactgttttaggagcgtatggaatacatctcagacatccgaaacctaaagccccctattgttgtgtatgactggggatgtagcgattcttcctatctttctgtctgattttatgtaaggtacacttggaggaaaagaaaatatgatatgatcttatgaataatttgagctttatcatacgtttattgagtatgctgaataaaaatctaaaatattatattaaagagggatatggtcgttttggtaggatccaacaaccaaataaccgcgaataagtaaacacagagaaagaaacgaaagaaatagaagccattgccctacataagaagataccctatcttcaccctcaactacactggttgtggatggtgtagtcgggcttcatcagaaaggtccaagtcatcaaactggtagaatgggccatcactactcttgttctggacagggccagaagtcccacgagaacgcgagttcatagcgtatgatgatgatttggcttgctcggtatctccaaaaaatcggggagatatacgacgtagtagagatcgaatagcgggcagacacgcacatataacgccaacgtcacattcaatagtactccaataccctatagccacgtaatccccttcgaaatgtcaatgaagctgcaaatatagaaagagaaaagagagggaatgaacactcacatgtaaggttagtggtagaggcaaagtgaatgagtgaattcagccgcaggatgctgacaagggtgacactaagctcatgagttagtcattgaaattttggaacaggctgaatagggaaacgcacaatatgcccaggctgaacatgcaaattacgaatgatttccgtttcatggaaaggttcaaaccgtatagctgtcgtagagggagtgccatgacaattatatcgagaaccatgttaagcactgccgatgaccagccctgtgcgttgatgtggttgcatttgtagttctcctctccataccagcgatgccacgctccgggtagaggccgacactggaataccgatatcaagacaaaggcgatccaataggagacgtttagtgcaatcaccacgtacgttgctgtccgaaacctccgatcggggaaaatacgaagatagaaaaaacagattgatattttggtcagcgggagaatgctcagatacaacaattcatcccaaaagtagacctggcgcaattagacaacgtaccttgggaagagcaggaaacaagaactttagggtactcacgtaaagaatatgagtgatattgtcgaaaggaagggtccacatatccttccctaaacctgtatcggccactatacaaatggttagtggagtgaaggggctttgactagctgccaaggaaaccatacagacgaccgagagtgctgaaagtggtatgagaaaggcctgtcaatttcagtgagaagagaattcggtttcgagcaaagggaaaggtggtatataccattgtcaacaccattgtccaatcatccgctccaaaaatgccaccacagcatctaaatcgagccactatccggagaataaaagcgcaaagggctataattccgcctgcaacccctgcataagatacagtctttgtgtgatcccgaattgggtccccgcatgctgatgtcgtgacattttttgtagcttgtgtatattagcaggggatggaataactagtcataaaaccattgactcacttagagattctcgaattgtacaattggcaagaacacactcctgcagaacggccgtgtagtgtacatcattgcacaggcatgtctggtcggttgtcttgcaggaagattgcgacaccgaagtcatcatacagtccagctaagaagggtcagtgatatcgagttcgcgctaaataacggcagaagaattgcacgacctaccgcacatgagggtaaaacggccgccaactgttccattcctgctatcacagtcgttgcgaacagggcggccacaaggactgctgttttgaaaaaacgcatcgtgaagcttacaggataggattcattcgttttgcgattaagagactgtcaaaggagacctgcgctgaatttgatcagtcgagtcaggagaatctacggagtaatattatgagattcacgacgatctcttagctgggatacaagaatttgttctaccttcctgtcaggatcgctagcgcatgaaaatctcaagtttaaatgccgcatcagtcctcactggggatttgcctttctacatgtttagatgtttaggtaccacatctgtcattgacgttatttggggactgtttcaagcccctgccagttatcacattgtcacctagcaacaatccacaacttcaggagttcctgaaccacatcacaaaagtacaagtaattctatacagacggagtacgaagtacaaccggcaacttcggacccttagggccagtcaagaagttgactaagctggtctctcataactaattgactaaatggttatggatgatggctgatttaaattaagatcggcacatatacgagccttccccagctcttgggccaactctagacgtttggaggggcccactaatgccggaattgatggtccgtccagagaccgccgatctaaattgggactttgacactccccactcactcggagtaggttatccatttctatgccgtatacctagttgagcctagtgttctccagagagatccacaggctccggaataatggctaaattttgctcagactcccgtggagatgatccgaagaatctccgtagtgggtctatactatcgggagaaagagcgcttcgatatttacgatctacacgcatcaatgatccttagacatatcttacaaccccaatgccgcgatcagcactatcgttgaacaaagatgtttcaccctggaggcgtctgctaagatttaaattcaccgcgaggcgtgcgccaagatccatatatccaccacaggagcgttcgaatattcccaaattaggcccgatcgacaataacacacgaatagtacggagtatatgtatccataatccaccctgtgtagtcgaagggatggtcatggaaaaatcaggggcttgtgtcgtacttttcgtggctttttactccgtgcaggggtgctgaaagggatctaccagaacagaatccttcaatagagaaagagccggaggattgaaactgattgccggttaatttacgatatacacaatatattatttgcaataccactaccatacgcctggacagttgtctctatgttgtactccttcgggccataattgcatatattctatagtggactcatacgctaagacgggccattcaggggatcatcatttctcagcatgtgcgatcttcgaatatttacctaggcatagaattgacgcgggatatctaaggaatgcattattccactcctctggacagtcttcttcagtcactcgttgcacgatcattcctttgaacctaaggggaaactggcatttctagtggaggactaacacattagttcatcatgcgcattctcactgcagggttttttctttgccaattgtcactttctacactagtatcggctttctcggggtcaatgagcaaccacaatggtcattcgagacatcaaggcatgcacaagtcttgcccatatgccaatgccaaggaccaggctgaaccgaagacggaacatgagaagcggtttctcttcagtttgatgaaatcgcctatcgatagtatgccaccaaagccctctcgcttgtcacaatttgtaacaaaacaatagttaccggagaacatgcgttccaacccccagacttcgagaatggtgaccagcgaggcccctgtccaggtctcaatgcactagcaaatcatggatatatcccaaggagtggagtggtgtcggtaggttattcctatatgactatcatcaactcctagctaaatccagaaaaagttcataaatgtgatcgcagcaatcaacaaaggtatgattgcatcatgaaattctcaacacagcatattctaacctttcttcatcagtgtatggcatgggtgtcgacttggccaccgtccttgcgatcatgggcaccgtctggactggagacgtgctgtccctcgatcccagcttctccatcgggggtcccgatactggcgttaacaaccttctcaacaacttgggtggcatcctgggttagagcaccttacttgcttgctcatatctatcaccgctgacatcacctgcagggaagccgcaaggcctcattggctcgcacaattttatcgaagcagactcctccaacacgcgtgatgatctctacgttacaggcaacagctggacactgaacatggacaagttcatgacttggtataatatgtcttccgacggcacttataatatggatctcatggctgaacgcgcaaagatccgtatggatcagactatccatacaaacccggatttctactacggacccgtgactgggctcattgcgcgcaacgccggttacatctttgcaggtcgactgttccgaaatcactcgagtgaaaacccagagggaacactgagtaagctgatataagaggactgattatgcgagatctactaactccatcctagctaagagccaccttcgaaatttctacggcatctatggcccggaacacaatttaacctaccgcgaaggatgggaaagaattccggaaaattggtacaagactcctatagactatggactagtctcactcaacgtggatgtcataggcttcatattgaaatatccggagcttggaaggtaagacactctgccaggttcctcatattgataatcttctaacaataatttgaatacagcattggcggaaatctgggtgaagtagacagctttgccggagttgatctcggggatttgacaggtggtgtattgaacctggctagcctgctgaagggtaacaacttactgtgcttcgtggctgaggtgctgaagttcgccagccccaacgctcttagtggcatatactccaccgtagccaagccgttggagtttgtcactaatatcctcgctgtgcctttgctcaaccttacttgtccagcattccaagatcttcagctgggagggaagccgctatgggaggcgctccaagatgactttcccggtgctttaaagagcaaccgttcgctttaggtattgcgggcttgctttggattggatgtattataagtttttattccagtttaatactttattaataaaattctaattgttcctgtgaaaacctgaaaatgggtatatatagttacggggtgctgttctaagacagggatcaacacatgcattaaggggaatatacggggattgagaattcggaaacatgcaaggttatgcaggtcaccatcaaatgccaacctgcatattatatagttctgtttgcattttgctgcatatagttcgggcttacagctgatcgaatgttagaatgggaccgctaatttagtgtgaaggaaaatatattaatccgtgttaatccgcgtttcgaccatctatctgctcagaggggtcttagcgaatgtcgagatctctctttatactaggatgtcttcatagcttataatagacgttcataaagaccccatgatcattatttacagtattatctttaccactaaatcctatcttcttctgtactagggtattataacccctaaaagaatcccgacattcgctgatgtctgacattcgccgagctctcggaattcggattaatacatgttcctctgggccaagaggcgctaaaaattagcggtcccattctaacattcgaccagctgtcggtcgcaagggactgatatctgacattcgccgagctctcggaattcggattaatacatgttcctctgggccaagaggcgctaaaaattagcggtcccattctaacattcgaccagctgtcggtcgtatagttctgtagcgctcttgttttgcgttgtctgaattagtaaaacggcgcaatgcgtgatgataacagaattgtcagcttatcagcaatgcggctcagtggtttagtgggataattcatctttcgggagaaatctctggtttcaaaattacctaatatagatgaggtcccgggttcgattcccggctgagcccctttttttattttattttagaattccataccccttgaaccatacatttctgagggttaaagttattgatacccatgcatattcaaggagagcccaccaaccttagaagaccatgcataccacttacataacgtgtattttaaggttctggggtcgcgtagggcggaagccaattcgatatcccaactgcactggcctcggcatctctttccctgtaacagcattgcaaggaattttggcttcttcgattgagttcccttgagattctggaaactctctctgatcagacccctcagaatcaaacaaagaactctcatctgctaggcccgattaaactgaactagcgcatcgtgtgctagatctagttaggcggtccggccaacgacagaccaacgacaaaccgagctcatgcaactaagcgatagtttagagccatcgtacgtgtccctggacgaaagtgaaagtcccgactgagcggtgagaatcatctactcatgaatggtcggggatgatgaatgacagggattgtttagtgtcggggcagtgtacaaaatacggactaatatgcggagcttgttgcgccctgcgcttcgcttgcgatattggggctgtctctcttcatctgtccgcatgggattctgcctatagatatgagtttaattaacttgagtttgaccatgccagattagttcctcgaaagtacgggggccagagtgtaacccaagacattcctggaccttaaatgggatatcagtaatgcccattctttcaattggaagtttaagattagacatatatatatgatgcatttccctgatgtttggatctgccctatgcatactattcagtcaacttgttgatttctcttcatcatgcgctcgctgtgggcattatcggcactggctttctcagttaaagccatacaaacaacaggatgtcctattttgggaccggcattccctgcccctaccgctctttcagaggatcctactttccttagcaaagctgaggaattgacctcaaagctcaatgatgccattaaaaatggaagtctgcccgccatatccttcgcagtgcaggtctttagcagcgaagaggacgacgcaccattcgatttctaccacacagatgatccagttaaagttggatctgtgggcgttcaagaggtcgacgaggataccatgttccgcattggcagcatatcaaagctgtggactatgtttctcttcatgaccctggaaggaacacagtacttccacgagcccgtttcgaaatacgttcctgagctgcgaacaaactacagtgcagcacaggccaaagatacaattaattatttgcaatggagcgatgtgacgatcggcgagctggctagtcaccaagcgggccttgcaagagactgtatgatcataacccggcgacgcgagtgtgcactgtgaaaaagaaactcacctttgattttagatgcatttggagacctcgaatttgagtcagagcttctgcagggcatggggttccctgcgctcctaaaaaatgatcaactgacttgtgggagcacgtctacgtgtgataggaagggtaagtcaattgtgtgcactcataatatggtcgaattgtttggctgacagcgggaatgttttcaagaattcttccgtggcattctacaaacgcgtgagtaggcatgatgccgctgaacttggacatacccctaacatggtctattagatcccttgactgcaacatcacagaccccgatatactcaaacgcaggatatcaaattctaggctacgtgttggagtcaatcgcaaaagccgactttgaagatatattactggaccgtcttatcaagccactcaacttgactcggtcttgtcttcaaatcccagaccccagcttggcagtgattccctacaatgagactttcagttggtttgggtatcagattggtgaagaagctccgtgagtgctaatcagccatttgaagtatacatagcttacacattgctagtgccggaggcatgttctcttctgcaaaggatatggctacatttggccgtgccattctttccaacacccttgttgaccctgccgtgacaagaaggtggctgaggccgatggctcacacatcatccctgcaactgtccgtgggcgccccctgggaaatctatacatttttgacacctcgtcgggtcgacctgtataccaaggctggggacatcggactgtactccagttcgatcggtctttcaccggatcacaatgccggtttcacggttctagtagccggagctaactctcacgcgatgacagcacaaatcggagaaatggttgccgatattatgcttcccgcgcttgatgaagtcgctagaaaccaagcctttgaacgctttggcggtacatatgccttgacgagcgactccttcaattcctcaatcaccgtcatggctgatgacgggccgggtctggtggtctcagcatggattagcaactcggtggacatgatcgaatctttgatgaccttgcaaggggtaactgatcgctctgcgataggcattcgtctacagcctagtggtcttgagaccccagggcggatctccttcctggctgttatttatgcacttcctatctcggaagatgctgggccttttattggctcttgcttttcgtggattttgctcgagtcaatggtgtatggcaacgtgggccttccagagtttgaattcactctggatcatgatggagatgcgacgagcttatccccccgggcgttgcgcgttactctccctagagtttaatagatgagagtttatcacaatgtatctaagttggcggttgtttaatttcttattgtatagagttactctacgtaacagctttgaaatgtcgattggtcatgtccggacttttaaacaccgtcagtccaatctgggaacattgttatgaataccatcattatttatttttcagtctcgcaagagccataatttttgtctccctttgtcgagagcgcaatgcgtctgacgctaaccagggggctctcctcgaccgctcaggccacatcttctttctcctcacccccttctcccgacgaactacctctccctttccacatgaaaagcacactatattggtcttaatcatctgtatggtgctcgtttcgtacggagtccttcacagaggcttcacttgaaatatatccagcctcgtttccagccgcttcggcactttcttcgatgcgaccatatgatgatcaagaacggtcgcaatctgtgatgaaagtcgggttccttcagtggccctacctcatatcgcaagtaaggtcgacggtcggtcatgcgaagatgttacacccattacatttcgacaagcgcccgatcgcccagataatcacaagctattgatcattggaattttgccgaagtatatcttttggacgatgatgttatcataaaatccttcgcagccagagtgaagaagatatgcaacctataatccgcgaagctataagttatgacattctcggaacccatccacggattgcggtatggctatcacgatcggaatatatcgacatcagtactatctacatggcgacgttgcaaaatattgccaggagagctcgatcacttccgagcttcgatctaaatggttccagcaaatcttggaagcagttgttgttattcacagccatagtgtgttattcattcggatcttgccctacggcagtttttcattgatgataattcggatctacgactcggtgatttcaactcttcacaatgccctggtcatatatcaccacactgcttgccacaagactatgaacttcctaatactgaaacgtccgatatctttgccctagaatctaccctctacgagcaagttgctggtaaggccccatatagcgaactctctcggcctaaatccgatgatctggatattatcaaaagctcaaatctgaagacaacatatggtagatcgtgaaattgaatatagttcaaaaaccgcaattttcctgatgtgtctgatctattcggaggagaaatcatactaggttgttagagaggcgaaattcccactgctcaagtggcatttgatttgtacttgaaagatttcgtttaattcatatctgaatacaaaggtaggggagcgcgaatgtccattcaaaccactccattcaatcaaacccaacaaacccatcaaaccaattaaaccaatcaaatcatcaaacccaaacaaagcaaataactaaagcaaacaaacaagttgtacactccacgacccacttgtctcagaaactccaacttctgacgatacatggggtcactccaggtagatatcactagcctctgatttgaatattgagattcagaatagaaaaagttgatatttcatttggacgactttgattcagacagaagaaagaagaaaatgaccaagaaaatcacgacgttaagagattcagcttccatgacttgtaggacccatctagatgaacatgggatgatagtagcctagttccttcagcgttatagtaggcaacagtgacgatcttttcctatcatcgaactcgggcttgataatgaattcgtgactgttgtcgtcgtgagaagatgtgaaatatcccatgatgatcttgtctataagatctggtcagagcggaacttttgcgagaataatccgatctgatttaccaaatgacatgtccgtttcctttaatcgtgcattatccacgcaaccatctgtgcagcctcttgccacgtcgctcattgtagacgtgcttattcaaccccacacttttggggacggggtcagactggtagggccaatgttgaataatatgagcgtatgatgtatctgtggcatctggttggaggcctaagtggagggccgacagaattccggaatcttcagttgagactgtgtcataaggaacatagcactgactttacaattagtaatgtgctttgttctatgctttgttctattgtcgatattactggcggactgttaaatcccacacagagaagctcttcaattattttggacgctgaatgaaccaagctcgcttaagttggtacccaaaagtcccaaatctcgcgatcgtgccactcactaacggcacgagaggatagaggtggccattgcaaaaagaagccccaagtatttcttgggacttggatgatatttgtgggagttgagaaggttgaagaaagaagaaaagtgaggagatacagagatgaggtaaggtcgctccttcctcaaaactgttgaggaagtcactagtcacccggacatccataacgatataaaggaaggaaacaacaacatatgtacagaacatcaacagcacaaaatttagagtttaatcataatacttagcaaccacacccccaatgataggctgatctccgatttcactccgagccacacctttgtcaacccccttggccactctcgccttcacccactcgccagcagtgataccaaccgcactattatcggttgtctggtcatatcccagacgatgcagcacgtcactcacaaccggtcgcagctcgaggctatcctccggtcgaacaaagtacaaaacacctagacgatctacatccctctgatcgggcggcggtgcaacaacacggtgtatgctgctcttgaggaagccgttggtgaggaagtggagagagtccgcaagattcaccgtgatgctcccggggtacggcttcacccacttccactcgccctctggggtgcgaacctgcagcgcagcaacgggttggcggaacaacagagtcaagctgccgaagtcggtatggcccttggaccaaatcccggcggccttctcgttttcttcgtctggacgccggtggtacttcatgtaccttaggtggcagtcgcttttttcaccatagcgatgcacttttaggaaatagtcctcgggtagctcgaggataatggcgaagagcacgagaagtttggccgcgatttggtcatgaatgtggcgtgcgaagccttcgataataggacgattgttgttcacaatgtccggttggggaagctcgagggctgggatgaattttgggatgttgtagatttctgtcttgtcatagacacccggactaatttcctaacctagggttagatatgattgtttctcgccgtagattatcggcattcgacttacccggagacccattggcttgtagccattgtagccacctttctcaagctccgcacgatacttgagtttctcctctattgagagattgaatatctccttgccaatagcaaattggcggtcaacatcttcctgcgagagcccgaagttggtaatataaaagaagcctaatgccagataagtatacaatcatgggaagctggtgttggaaacatatactactgacctatattctggatagcctcaaaaagttgcttggctaactgctctttaccgccgggttggtcgaacacagacagatccaaggtagcgagatccgcccagtccactatatgcaagttacacgttagcatggtgtctcaaatctcggctaggaccctaggttttgcattaaaccacttacgatcaaaagtagtctccgggacctgactgtatgttgggatatcagaccccgtaggaacaggggctggaggttgggtcaaagttgccatggttcatgcaagatagtggaagaaaatatataaaaagaatatatcacagcaagctggagtagaaggatttggttatggagacaatagcgtgcatttgcactatatctgacagatggggggtttatcaagatcgcgatatccttggttttgtagcggatttgtagttgacccttgagcttattgttgaatccattccaatcgggcaatttgtaggtttattccattgacagcccgcaaggttgatatgcaaggccggccagattggtgcgagtgcaggtggacctctttacgccacgtgggctttagatctcatcatgatatcctccgtttgcgtgatcagcgactgttccctcactaaatcgcgacttacgcacttctacaatatttccaatgataactccaaataagggaatgaatgactttgaccgggaacgtacttatgaggatattaactacacgattttactaaattcgatatataattattgacgaaagtaaagagattgattccaaaaatattcgaatagactatctccatctggatttgaatccaattgagactatattgtatgtcaggacttgacagcagcaagtatggcctaggccatagcatttgcaatacttttcgactatgatacaattttttatctgctaggtttggagcttggtctaagcttctataatgtttttcggagggtttccggactgataaaggagatgcatggcgatctatcaatgacaactcgcgtttaaccgggactgtcaacagtaataatttgagaattatactgtcgaaagcaacatcgctacaatggcagacaaagaagacgggcgcatttcatccaaagatttgggcaggaccacggccaccgatattatctccaccagtgataccgataccaatcatgcgcttcattttgcgagacgtggtgaagctcttgaagaagcctcatcaagcctggaaaccatcaatggctacgatccggagcttatgaatggtaggacactgctcacggcagcagaggaaaagaagctactacgcaagatcgactggcggttaatgacgctttgttcactcatttttatgtttaagaatctggacagcaacaatgtgcgtatacacaaggatactaggtgggacattataactgacagcctcgcaggcatccaatgctcgaatcatgaacaagggaacggatcagaatatcatgacacagctcggaatcacatctaacgagtacaatcttgtgactgtgctttactatgtaagatatccagcgagtcttgatccagatgccgtggcgtatcgctaatcatatgtgacaggtcccatacattttgttagaagcaccctcaaatttactgctcaagagatgctccccttcaaaatggcaatcaaggattatgatcagctggggtatcgctctcatgtgcaatgctgctgtgaagaataagggcggtttatatacgacacggttcctactgggtgtagtacgttaccgcgccaatatgtctcatgattccaaaatggaatagactaacaccgcaataggccgaggctggacagttccccggcgtcattctccagatgacttactggtatcgcccggacgagatgtccttacgactgctctacttctgtaagctacacacgatccgctcgcaaaacatctcgtactacatgaaatttttaactgacgatataaagatatctgcggaaatatctcgggtatcttcggtggtcttcttgcctatgggtttgacaacgcatctggtgcaggcggcctttccgggtggcaatggtagcgttctcttatatccattcctgaatccgtactaaaattactctaggttgttcctctcagaaggcattgcgaccgttctttttggatttgtgatttggttcctactcccagactgtaagggtcatcctttgctcataacacgacgccagtgactgatatgcgaaaacgcgagatagttcccgagacagccaaatggttgactgagaaggagaagaagtttatccaggctcgactcccatctaattcgccccgtggaaatgagcagcacttcaagctgcgtgaagttatcgagtcactgaaagatcggaggctgtggctgtttacggccatttgggctacctttactgttggaaccaacggtgtcacattctatcaatcgacggttattgccaacctcggatacacgtaagttggttactttccgcatacagttatgacttcaacgggcattgctaacagtctcttaggagcattgcccaagcccagcttctcaatatccccatcacgatctgtggtctcctagtcattgcggctacaggaattacagcagaccgtagccggataccccggccattatacccacttaccttccttgttatcatcatagtctgctacggggtctttgttgcctatccgagtaatgctgctatatacgcggtaacgttgatcggaaatgccgtgactgcatcatggtacccagtcatgtggtaagtttcctatgtcctcatccacttcatatgtttgtatagctcacaacgtgataataggccatggcgcgtacaaaccacctctcgagctacgggatccgccttctctatcggatttgtcaacagctacggtcaaattggcggcgccattggtccgcagttgtttcaaagcaagtttggacctcactacacagtgccattctccgtcgctatcggtcttgtgggtacttgcgcgatcttgacggtggtaacgtggtgggtgacacaggagacggagcgtgacacgaggcggctgaagctagctaaaatcgcagcggaaaaaaggggcgagacgattttggaagatgttgtggacaatgacttgaagaacaattgagggaagagctgttgacaagcctagatatattgcggaaacctatatacaagctgtagattatagaccaaagcccaactccatcgttaacaaaaattcagtgaataatatccgtgacgtgatgatcttcagaaaaaatgatgttcttttactttgtatgatgttaattaccccgatatccaattactccaagttccaaaaaaggtccgagaatcgaatcaaaatcgcgcgatctccccgcggctaataaaaaccctccgactccatacatacccctcacaatttgtgggaacctcttcatgtggtcttctacatgattattccttattcgcagacaggtttctgacacagcatccttggtattcggctcatctagcttggacaatgaactcagttgacacccaatcgcccgcaagggctacgagtgacccctactttgacctgggaacattgagccgcaaagtcagcaccaattcccaggaagcccagatatggttcaacagggcccttgtctggacatattgctttaatcatgatgaagcaatcacctgttacaagcaggcaatcgcgcacgacgaaaattgcgccatggcctactggggggtatccttctgctcggggtccaattacaacaaaacatgggcgctgttcgaccaaagagatcgactcaatgcaatcaaacagtgttatatatattctcaagaagcactgaggcgggcaaacaatgcatcagattgggagcaggcgctcatcaaggctcttgcagaacggtaccccaacgacgatccaagtagggatcttgcaggatgtagccgagcgtatgccgatgccatgagagaggtatatataagtttcggtcgcgaagactttgacattatcacactattcgcggacgcattgatgaattgcgcaccgcggaagttatacgacgcctccacggggctgccgatagcgtcttctccggtattcgaagtgaaagatctacttgatcgggcgttgaagatgccgaaagttgaacttcatcccggtcccgcgcacatgtatatccacctgatggaaatgtcggcgactcctgaggctgctctgccggcagcagagatgatccgtgaaatatttcccgatacaggccataccttccatatgcccgcgcatattgatgttctcgtgggcgattatcgccgtgctgtggaatacaatctgaaagcgaccgtcgcagatgacaaattctttgaacagaatggcggcttgacattctacagctattatcgcttacacgactatcactccctcatctacgctgcgatgcttggtgggaaatcaaaggcggcattgtcagcgacggagcgaatggaggcgactatcacagaagaaattctgcgcgtcgagacgcctgcgcttgcaaactggatggaatttttcaaggccgtcagagtccatgtgctcattcgctttgggatgtgggaagaactcaagaagctcgacccgctcgaagataagaatctctattgtgtgacgaatgtgatgagacactatggaaaggccatcgcgtatgcggccacgtcgcagctcgaggaagccgaccaagagcgagagcttttcaaagccgcttcgaagcttgttccccccacacgcctcgacttccccaacaaaatcaccgacattctcaaaatcgcagctgctatgctggatggcgagatcgagtatagaagaggcgattatgatgaagcattccgcagattacgggaggcaatcactctggaagacgagctgcctttcgcagagccatgggggtggatgcttccagctcggcatccatatgcagccctgtcattggaacagggcagagttgagcaggctgcacaggcttatgctgaagatttggggcttttcccgacacccaaacgcacccaccaacacccgaataatgtttgggctttgcatggatatcatgagtgccttcagcttttggatcgccatgcggaggccaatattatcaagaaacaactttcccttgctcttgtggaggcagatgttgaaattacatcttcatgcttttgccggcttgggaaattgccctcaccttgtggaaagcttaaaatgaatggttgccacagtgtggggtcgacgtgtaataagagctagatgaacattttgcataaattaacattgttccgctggcttctcgtttatgatacatatagaaagatgtaaaatgtaaaatctacgcgcccaccaaagtaggcaacaaatttatcatgccaggtctttcgggaacaccttaaaagaatacgctataaacacgggtatcacaccacggcatctgcaacttgcttgatcatcccgcgaacctcatcaacgatacggaaacaaggcaccaacttccgcgctatcggatcatgtggacagagatcgagcgggtcgtgatcaacagcatcctcctttctccgacaacggccttcagaattggggcaattttcgtgcccgaccatatggcgattgcgttgccgctgcgcaaactgttcaccgaacaccaaaagccggtctgtatctgtctggaggccgtgcacgacaaggtcccggagcttctcgccgctgatttgtagattcaactctgacggtattccaagcccacagtcaagatagacggtcctagtctcgttgctgatatctagctcagtgcagtgcttatgcagccagcggatgtacctttggtagccggatgttatttcaaacatgagctggccgatgaggagcacattttgaaccgttactcgaggcggtttggacacatcgtagcacataggacaggtcagtagtctctctgtgagggacacgcctgcgcggagcatcggaacgatatcgtgtgacatattcgcgcggctcaagctccggattatatcggaaacctcttcgtcgcatttacaagactgagagaacgacatgggagagacgtatgcatccaaggctcttgagggtacctccgggttatgcaatccgctctggcgtgatgtgtgcaatagctcaatgggaaaggaacacatatcgccgttcccgagcatctcccagtgcgaggaatcgaatccgcagctaccggatagctcgtatggtaatgagtcgaactcaccggctcccattaacatattgccggcttcatgagagtcaaagggcgattgagaaatgacaggcgagaaatgcgaggagcttgaagatcctattcgctcctcttcgttcggtaaatcgcggtctggttcctcttgtcgtgcgcgctttctcggccttccaggggctcctttgtctttgaatttacatgtcaatgttaagccccggcaacgagagcaaccactcttttcgcctgagcatctgagcttccgtgcccctatttaacattagccagacattcaaggagtggagaacggctcagctcacggcatgcttcgcaggaatttcgttgtcgagtgggatacatactatgttgaatgtattagtttgatctaacaagcacaggaccgaggtcggaagttgacgtccaggtggaattggaggattggtcatcctgcgctgagatggcgtcaaccgagcttcgagcggggtagtgcagcctctgagcagcagattctatgcatcatgccgagtcagtgattgggatgaaaggtgtcaatagaagacatcaaaagctcaagtattgcgtgtgcttctgaatatcaatgttcggagctgtggtttgcgggtttgtcgaaaatcctccgagaaaaaactgccgagcttctgtgtagcgtcgcttcgctgtaatttccatttatttcctttcaattcaatcggtaaattttcattctggttgaacagcaaaatggccaaatccataaccgcacgcgaattgcgtcagcattgggtaaatcaccatgaagttgccctcctcgacgtccgcgaagaaggcccctattccgagtcccatcctctattcgcactaagtgtgccagtttcggagatcgagaagaagttgcctccactggttcctagattgtcagccccgattgtggtctacgacgacggtgaaggttatgcagctcgggctactgtccggatattagcgctgggatatcgagatgttgccatcctgcaaggcgggctttccggctacgccctcgttggtgaggtctatcgcgatgtcaatgttccatccaaggcttttggcgagcttgtcgaatcgatcaaccacactccatccttatctgcgcgggatatcaaggatgttctggagagtgagactgatgtggttgtcttggatgcccggcgttttgaggagtataaaacaatgagcattccccggggccgcagctgtccagggggagaacttctatatcgctttttcgaagctgtaccctctccggaaaccacagtggtcgtcaattgtgcaggtcgaacgcggagtattgttgggacccaatctttggtgaattctggaattccgaataaagtggtagcgctccggaatgggacgatcgggtggacattggagggtttggaactagagactaaacagacggaacgggtcccaggtccttcagttgaggcattacaaaaagcgcgggaatacgctgaatcgtgggcgaatcacgtcggcgtctctattattaatggcgatcagctcactcgatttagtacggagtcggaaaatcgaagtctgtatctgctagatgtgagagacccggaagagtatgcccttggacacccgaccggcttctccaatgctccgggtggtcaattggtacaagccaccgacgaatgggtaggtgttaggggagctcgcattgttctgtacgatacggatggtgtacgagggcgcatgacagccagctggctcttgcaactcggatgggaggtgtatgtctttgaagagcgattggcggtgcctgataggcttgtgttgcctgaagtctcttcgtggaatcctccaaaggatggcgctatcacggtgaacgaccttcagaacctcgagggagcgactgtggtcgatctcgcccgcagtccgtcttatcgcaaaggccacattccgggcgcatggttcgcttctggaccggaacttgcgcgagatctgagggctatcgacggtgacggccctatcgtgctgacctcgcccgatggtgacgttgccgccacgaacgttgacgacgcacgcaactcagtctcacgacaagttctgtatctgacgggagggacaacggcctgggtggctgctggtcaccccctcgagaccgaattgcgatgtttgtcgcagccaatcgacgtgtataaaagaccgtatgaagggacaagtaacgctcgcaaggatatgcaaggatatctcgactgggagtatgggcttgtcgcgcaactggccaacgatggggtggcgtgtttccacgttgtgcgggactcgcgtgagaagctgcactgatcggaagtgtgtaactctcacctagctacaccttcttgaagcaaaggaattaaacataaaaagtaagaataaacctacatttgcgaaggcctgattttgctgggtttatgccttaatatgccttaattatagaccgctttcgacaccgctctagaccgtgtaggtagtgtaaattgaagctattcccgccctagcgtcaggaaccgtccccgaccgcataaaccactgaattaaagctattttcaccccacaaaccatttgcacggtcgtaacagcttctatacctataaataggtgcatacggagattggtataaattcttcagagagatttgtccgttcgcaacagcttcaacgcctagaaatgggatatgcggagatttgtatgacgggaatagcttcattctttttacaaagttagttccaaggttcgatactttgcttattaagccctctgtatttttatttctgccagtctactccgtaaaacacctatgctcggctctccataccaagagatagggcagggtctctttcgtctaatgaaacttgcgaatactatacgtatcggaccagtagtggagccatcacaacgccttttatgagctaaggtaagacattaatttcccaagcactctcggacctctcgtaccctaaagacgattgcttgttgatatgtgtatgcactttgaagctttttcctgacccacataccggaaggttatcccaaaattcccttaatcggaattccccactgaacccaaaagtaagcacattatttctctataagtcatatgctctcacttctggtttatcacttccttcttgcgtagttagtgcctacattagtaactaagacagcattcgggtgaataggctgaagggggctgaagactcttgccaccgagcctgccctggccccctgactatcctcacggataaagagagagcgcctatgaaggctatcaagcaggttagtattataatcctaaccctttatctattatctactagtaaactattatctataggtcttcccagataccatcaatatgctttccctctggcaaattgcgaataatattgagaggcatgcaaaaccggctatccacaacttcgttcaccgtacaatgaatctatggggttgagcttcctcaactacaatttttggcttggaagtgctagacaatcgactggtcgcatgtgcagcaaagaggcagatgcagcgtttttccctggaattgaagtattgcgatgaaatcgcggcgtatctaggcatgtgcctacggattccaatttctcgcccccgcaaatatcttcccacagagagttaatcgctctccttgaagtaaggggagtccacttcacattccgtatatgcatgaggcaatttgccttcgtacaggaaatcgcgtataatatttgcagcacatgaggaatccaccgcgatagagcaatggccataagctttgacttcgacgatttgtgaatcttgaaatgcctccttcgccgagcgggcagatgtaagaggagttacaggatcccaagtagttgatagaatcagcagcggatgcgccgttgtaactcccttgcgtggtacgtaagagtgtgtcctcggcatagtccactgctgtctcatgaagaatattttgctgtgtctagcgccgaacatactctgattgaacgaagtcaagatataatcaagtagcggttgcctgtcttggggccaatttttgggaccactcaggccatcgttcaatctgataaactcgcttgcctcatggcccatatcccaagaatcttcacgcccatatgcaagaaaagcatttgtcgcatttccttgaatgagactgtacaagttgttggcaagtgtaccccacgtggagggatagtaaagggctggtaaaacaccatcataccagagctcttcataccctagtacaccatgtgctgtattgttcacgtacacaccaattggctgttctcggagcctattcatataagaaaggaccgtatcgcgcaattccacagatgttgcgagcgaggatagtgggcatttttttgtgcctgctctggtacactcttcaaaaaacccatcaagtaccttgtccgtgtcaacctgggactctatttcaaaagtaccgtcgtaccatttgaattggttcacgacaccgtcgatgatgacacgtttcgaacgctcggggaacagtcccgcgtaggtctgccccagaaggctgccgtaactgaaaccccaataaaccatgtctctctggccaagtgcatccagaatatcattcatatcagccgctgtctggggagtgtttaaatacttggcgtgttctcccatcgtatcgtggcatgccttgacaaagttctgtgtccatgcatagacttcagggctgtcaatctcgacattgcgagatctgacatgagctaaatcctttcgagatttgacatcgggatagcaggaggctagcggcgtcgagctattaacaccgcgaggatcgaacgagactaggtggagcccttcgccaactatagccctcagctgctctgcattctggttgaggaattcgaaaccactcgctccagggccacctggattgagaatgaggttctgggttgcgttcgtgccgcgcatgcggatgagtggaatggtgaagattttatttcccgagttgctctggttgaattgatccatggggacaaaaacattgccgcactccacgaagttccccttgatgaatccacaaggctcccaacttatctgttcaccagtgtatttgagggtcctatgctggtgccatgttggtatttctaccgaccagtgtttgagagcaaacgaagaacagatcaaaatcaccgagacgatggcccaatatttcgggcgagaagcctgtaattgctgttttctggcgaaatctcccagcagaagtgattttttcatggtagtgttttcgcttgcttcagctcaagtcccgtgggtcacgaatatgaagaatgtggctagacaaaagatgagtactcggagtagaaaggcgctttcattcgggtgttgttatgttatgttgttgcctacccgtgcggggattccacaaggcggaaaatggtagtgtgtattggcggcgaaaacgtattcaaaagatcttaccccgtacatgtatcgccgttgatccatgttgtatctttatttgagtttcactggtattgtattgttccgctagtagtgattgcatggtaggaaccgcattgtccaatatggcccatttcggctgccgtagatattagtctgtactatcgaagacgtaagatgcttacttcgtatctcaataaattctctaacttgtcccacagctgtagtctataattctcagctgctttatgttcccctccaatatctaaactgacacatacgaccatagggtgtggaaaatagggcttcccgtccgctcagccgtactcaagccacacgccggtgagttagtagttgggtgggtgaccaccagcgaatcctcactgttgtatgtttttttttttttactcggtgtgaatgaaatatagtaataacatatgtatttgtggaactctataataactttttagaaattaagcttaacgagacataagcatttgacatatctatctgacgctatgaccatctagagagagaggtcacctgacccaatgatgacgatgagacataagctctaaaatgacaatcttgtggacaacttagtaaacaaaaacaaacaaaacaaaatgaaaggattttttttttcgccagaaaactgtgggactggtttttctgcagtaaaaccagcctggtaaatcacgtgatccatctgtatcaaggatgatgtcgaatttcgtacagcgtaatttaccactagaccataacaaaaactaaggttcttgtttagggcctagaggggccatatcccattcttgacagatgaaaaaatgacggtattcatcctagagtctgacatcaacttctcttcttgttgtacttctcttctcccttttctcaccacttcaagccgataacttcctttccccgttgtctcgttcctgagcaaagatccaaaattcctttctatccaagttcagaaaagcctcttctgttatttgtttgacttgcacaatctacaatgtcggacctgcgaagcttaagtccatccgtcacatcagaactctccacctccgaacttcaagtatccctgaatcatactttacagggctaccagcctttgagttcaacagacgacacacctttttttctccagattgttttcaagtacctgcccgcagacggacagcgtaacctgatcgaagacttatctggatgtcaagatgaccaggaggttagacaacttgccgagagcatagacacaggtcttctccgccctatgttgtctaccggtggtaaaacaccggcagtcactccctcatctcgtctcggtcttgaggactcgatcgaatacttgaacaccttcgatgtggaatccgtgacacgagttgaccagcagcgactccgccaggagtgcttagcccgcgatggctataaatgtgcgataacaggaacctgggatatggataccaccccacatccccccgggcggcctgtacacaagttgcaagcagttcacattcttcccttctgccttggaaattttcgcaccgacgacgagcgagttaaaatgtcggcagtatggactaatatctttcgatggtttccaaatttacggtcccgtcttaatatgttattaggtgatgttaatcgcgaagataacatcctaatggtggcttctgtttttcatgaagacttcggcatgttccatttcattcttgagccaacaacagtaccaaaccggtatcgattgaagaaattcccgagacgctcatgccttgtgaattatccgacggcaactttcatcacccttacaaacaatgataccgtttcagagatccaaacccagagtttttagctgtccatgcagctatcggtaatattctccatgctagtggccgtgctgaactgatcgagaagctcctacgagatttcgatggcgctgatcccttcctagcgaaagatggaagcaccgatatcagcagcctgctttccgtgagttgtctgtcgcttttgagttcccgcggcaatacaattcaaaatgacgaaatcaccaaggccaagcgaagacctgttcaagctgaactgcaaggaacggaaaatcagaagcccaggtcgaatgactcgggccatttgccacgatgagcgatacttatgtctttcttttacatgatctgccggttgcttgtcgttccctctacccccggcgctatatcactttctctttattttcaatctcatggctattagaagcatgtatcatggggatctccgatactggattaaacggctcatcccggagatctacggagtgcgtgggacgtactatgctattcatcattggtaccgacccggacaatgggatggtttgttgttgaaggccgccagtggtggggactcatcgcagccggagaagatgatcaaaatcgggaatctccatgtgctgaccttggtgggagatggggaatatctgcccaggcgtaaatcagtggacgttaactggattgttttgtagattcggatctttgttattgattgcacaatctgtctccgtatacgctctagaacagccatacggctataaggtgatacgtaaaccgtctctggcacggccgagaaaagaggaaggtcatctgtcacgaaatatcaacaagccccaaagatccaaaatagtatattaattttaaaatggtagatcttcttcaccgcccgaccactcaccaaacagcgcatctcaacacatcaccgttcacagctcaccacaagactcaccatgaaattcaccataacactcatatacctggttactctataccttaatagctgatatcgcaatcaatagcggcggaggaactctatcggatcacaaactaccaaggcagaaggaaggggaatacggcacccgataacaaagaaatttcattcatcaatactgcggtcttggtgattgaatttgcgagatctatctaaatcccattagatctttccaatgatgatgattcttcggactacaaaccagataacgaagatgttatgtaggtctttccttctccgattactcttggaatacttgaatactagtcaacgccacaaagaggcacctacacatcgctagaggccttattcttacagcatccccctgcgtagaatactcttaacgcgaatcttatcctgcaaagcagctttcacgtcgcggggctcaatgcagcgacagccgtgaccacaaaacctctcaaatcccgcagacaagcgagggacactatgatacatcagagtgtgaaaaccaaaatcttgaattaggctaaatgcatctatcatgctaaactacttagggtatgtctcccactagccgccattatcaaccagcggtagacatactggaagtagctatcggggagtgtgtcgccagatgaagaatatgtgtctcgtagcatttctcttttttgaatatttgaaaagctacagattgctggtgaagattgaagtaaagttaggcaaaatctcgtatctgttccaacgcatacagtttctcacttccagatacccctcaggccagttgctggaatcggtgagtgacgtcgaatatggaatatgcaggtgtcacctagtgctatgactaatcccgaagtttacccttaattccccacctaggaaaataaggtttacccttgactcccgaagattacccagaatcacaagacactgttcaagcaatgccatttgtggaaaatggaggactagagtcgtgttcgtattaatgagaactgtgctcttttaggtttgtacccgggaaatttgattcgatagttggccctgttccgattgagtctgggcctagggtaaaagcccattcccgcttcactcccacttttcctgcctgtggctaatcgctcttgaccgggcttagaacgatcttaagaccctccggccgtcattcttacctggcccaaccacttctcccttctcacctgactgaaaactcctggtggttattaccggcagcccctgcgaagagaagtgactgagtcttctcgtcgcctttcgtcgttttcaccttcataatgtctcaaatccaacaagaagtcaatgaaaacagccaaggggcaagtatccacattgcaaggctggagaccgaaccacatcgacgggaattcgccgccatctcaccaaatattgtttccaaaacacgccaaggggtcataatctttttcatcgttgcaagcaacatggtacaggtgaggcaatactcctcactgagtaaatcgacagactttgacagccgaccagatgatttccaacatggtgggacttgccgctggccttgaaattagtagggtgttgggtgcacctgttgggccggggaaagccaactgggctgccgcctcttatccgtgcgtaatgtgacactaccgctatagccccgttcgagacacttactactcctctagattgacacagggcacatttgtgctggtcagtggccgacttggctctgtgtatggtcaccgaaatgtgttggtcgccggctctatttggctagtcctatggtcgttggtgaatggtttctgcacgacgttcgtgtcattcaacgtggtacgtgctctttcgggtattggcggggctttgataatgcccaatgcggttgctttaattagctcaaccatcccacctggtcgatcgcgaaatataacgctcggattcttcggggcatctgcgccgattggaagctacctaggagctatctgggctggaatctttgttcaatggactagctggaaatggatcttctttggcctgtgaggtttttaagacttgacctccttcttcaagatactgacaaatgccacgacagggcaataatgggcgcagtcgttttcggcgccctgggagcactgctgccacccgaccgtcctgttgatcgatacggcaaaatagactggatcggtgcgctcttgggcacaagcggactgattttgtttaatgttgcgtggaagtaagtgtgtcttacatcgattttgtagcagtttggctaacacctcttagccaagctcccgcaagcggatggaatgctccgtttgaaattgtcattataactgtgtcaatcctgttattggcgctgtttggcctttgggagtacaggtttgcagacactccgattatgccgctggatatatgggcaacgccatcatttgccgtcctcgtttttgtggtcctgttgagcttcatgtccaatgggatctttctatggtacatggtcgcttggatgcagctgttgcgaggaaagactatactgcaatttggaattgagtggacgcctttcgtgatcgtggcaacagcgggcactttcattgcagcatggctcataccccggcttgcagctcagtggatactagcgattggctccgccaccatcttgattgccaacatccttctagcaactatgccagtacaacagatgtattgggcgcaggtttttccggccacgatattcatggcgttctgccctgattttgtctatgtggcagcccagattgtcgcaagtaacagtgtcaagcggcggcaacaaggaatcgctgcttcccttatcgcgaccctaaacctctatggtaacagccttggccttgggtttgccggcactattgagactgaggtcaacaagaagagacccgatcaagttcttggattccgggcagccctgtatttcggcgctgggattgcattgttggcggtaatcctggatatgctcttcgtccgagtcatcaaagatgagcgagagggttggagtgacccggccgatcgagaagaattcatagaggaaagctccaccacggcaatcgagctggccacatcaatggtacatggagaccggacgtaggtctgcgcagtctttcactgcaacaatgtatgtttgaggggggtgggggggtttgcgctgaaataaggaacgagtgaagggtcccgcacaacctgcaaaccatccctgccttcacaccatcaacgccttcgttaatctcctttctgttctgtgccaaccttggaagtaatgctcttccgtgatttgctatcggtccctaggctccctccagattgctagtctgatgcattacgttcccttcttactaggcttagtatttctcatattcggttttcactagcatttctgcccaacggacgatttccagcgtcctcatcttctatgattcctccctttttcggttctatacactttatgcatgggtgaccgggccaaccgcctagagcaaccgggaaggcattaaagcaattatcaataaataaaagcttggcgatatggggattaagccatcaaaaagtttgagtaaataaaaagaataagataaaaaaacatacaacagtgaggattcgctggtggtcacccacccaactactaactcaccggcgtgtggcttatgtgcggcagatagtcgggtgggtgtcgcccgggtgagaaatgggtgagtgctgctttacggtcgcgcgaccgggggtgataagggtaagtgcgctatagacagggtgagaatcagggtaagaatcacctaggtcgcgcgaccaccgcattgacccctttagctgaactaacggcagaatatcattggatcatattgtttcccttagaacactcgatatcctggcatctgtatataactagaactggaagtatcatacacctaggcagtaggcaagttggcaatactaatcgatttggttaatctgctcaaaaagctatcttgaaatcgagctaaacgcactcggcgggacttataactattacaggccaatcagagcttagtgtaatttagatataacttaagctacttgcctaactagctagtgactatttcactaaagtataccttatttgtcctgattatttagagtcactggaataaaatcctgtcgtagttgtttcgaccttttgattgatgggtcataatgaattcgactgccttcctcttttactcatctctgtataccttttaacttttcgtgcgttttatcacgcgaacaaatcactatcatagaagaggcctcaaatctcgactgcaggccctcaacttggtctgtttccgccttaggtgctattattgaatggtaccgtacagctgaccactaagagtttctctcaaggtctgcccgtaaactttcatatgagcttcggggtatgatcgaggttaaggtcatttaatgatatagttagtcgggacagaagttgctggctgaggacgtctcttctaaagcaatatcaatttcgggaccttgtgcttttccgtcttccagatcttactatttcctcacgagtcggggcagggatatgaggatgggagctgtatgtataaactcccttattgggcatctccataaccaaccaactccgaatcgagtacaaacgccagaaaacattatggcgccgaaggagattatttcgccgcttgcggagctgctcttgcttgacaccactcaaaatgggtgctatgtacgcggtctgtggaccttggagtccagaaactaactgtttgagtaactacctgggatatgaaagaacagagggctactccgatgtaatatatattggaattatgcataggcttcaagagcatatgcctcttttcatgcgctagagagtgaatgctttgaaccatgtcggccgtccattctaagtcgttattttcctaagcatgtagattgggggggatagaaagagataaacagaagcctaactaatcctcgatccgctgaaggttgaacaaccacgatgatggcctgtaccgtcaacaaaataaaaaggtctgatcaaaaccaagtgtcatcctattcataataaatgtcctgttcatagtaaacggaagcaggagtggtaagtgaccgcaaaattttgggtcaaataattattggcctatacatacaacagaaaagatagcgtgcggttggtattcacaagtactctgagaatttaacaaggggattgatatactcacaccccctttggctaatccgacacccctttggctaatctgataccccctgcctgaaaattaaggtatgcattcctaattgggtaccgcttttgcttcgacacctgtgcctgtctaccgcattccacaccgccttctaatttcatacaccgccttcgtgacaaagtctccatacaattatagtgacacagtaggtacctgcaatttgtatgtaaacccctaacaaaattaagtcactttcgttatattgcactccatatagacaagatcaaacaaattgatacttcaattctggtttacatacattaacttgccttcttccacctcatttttgacattcattttcatccaaatccctccaatttcatctgtttttatcagttttcatcctcaatatggcctcactaggccttgaatacctcgaatacctgctatcctcggattccgagacagagatcgtccccgagtctccacccaccgagccaatcaccaagccaatcaccgagccaagcactgagccgccaagcactgagccgccaagcacccagctgccaagtaccgagtccacaccaagctttacgttcccgcttccgccaatagaccagacgtaccctacctcggaggaagcgattgtctcgattaatacctttgcacgcccgcatggatatgcagtcacctctaagcgttcaaaaaacactaagaaaggggtgaaaaaggctgtctatctctgctgcgaccgtggctgtatatatataccacaggacttagagaagaaacgacggacaactacacttgccaataattgtccctttgcaataactcttcgcctcgacctctatatagacatttagcgcctaactaatgagaatcctacctataatcatgaatcctcaccgccgtctacctatgccattcaacggtcccttgcgaccgacagctgatcgaatgttagaatgggaccgctaatttttagcgcctcttggcccagaggaacatgtattaatccgaattccgagagctcggcgaatgtcagatatcagcgaatgtcgggattcttttaggggttataataccctagtacagaagaagataggatttagtggtaaagataatactgtaaataatgatcatggggtctttatgaacgtctattataagctatgaagacatcctagtataaagagagatctcgacattcgctaagacccctctgagcagatagatggtcgaaacgcggattaacacggattaatatattttccttcacgctaaattagcggtcccattctaacattcgatcagctgtaagcccggtcccttgagctgggtccacgggtggacggtacgctgagtaagctggaaacaggctgcctaggtggtccacgtgagagtgggtcacggtgacacactaacccatttccgcccagaggcattatagttcctagacttattccagctctccagctttccagctttccacctctctatctccacatctccacgtttcttcgtctcttcatcattttcataacactgtcaaccaatctcgtcgcgtttccacgccgtctatcatgtcttctcaacctgtcaatccgcctatgctgcaggaccatgatgccctgagaaaaatgttcgaagaaaaggccgactccatcttggaatggctagaatcgaaaagccaggtctcttatgactatgataccctccgtgaaatcggcgttcttctccaccatatggatgtcacatatgaccaagagtcccttgactttaagcttttatccgagaaagaatacagcacatacaaaatcgacagcgctaggatccctaaacatatgcgccatcactatgacggttttgacaaggcctttcatttgtctttctcatacccactatcagacccactaccaggcaccgaacttgtgtatgagaaggcctttcaaatcgccagatatatcgacatccttcaagactactctaagaaagatgatcccgataatacctcttcgatagagaaaaactcgaactggtatgagatcttgtgagttcggtcttcctctatttccccctattacttataactaccaagaaattgactggtttatttatctagggccgaggattcctttgaggatgggccacaaggaatgttacatggtttacatattgggcattcgaaacctctcgatctttcaagatggagagccgtaagttaccgacaatggcaagaggaccctgaggacccagacacaatccgcccgcatgttatgcttatgatatgcaccggcgcggtagcaaagtctaataaccttctccatggcgagattgggccgattgttaatacaatccagtgccgtctcctccaggaggagtttaagcagacttcgagttttccggtatagacctagtaatccctattataagtgagcgctaaccttataccactattaggttctcgtcatctcgctgtttggcccaagacaggggcgtatgctctatgcccgattcaacatcgacggtactttgattgtacgagcgtcagatatctttgatttcaagaagaagaaccaagagggatttgacctcttcatgcgctactacaactgcgaacccgaagatacggccgtcctatcgaaaactctccatctcccactatcaccatcggccgtacctcgcaagtccggaattgttgataccccaatcacgtcattctccgtatcggagaacgtcccccacgcggattagaacggagtttctagcattattagtgttatttcgtggagacaggtgtgagcggccgcttaatcgtggagaagaattcgaatggagcagggcgagattgttcagtagctagttacgagtatcccatagctaaattgactgtgcttcagctttgtgagcgggttgtgcgcggaaccattacggttagaaggctgaaataagagaaggcctctagcaggggcgtaagtagataccccaggaagccttcgacaacgaacgtaaacaagaagagaacatcatctgatttgatcttgtcggggagagaacgacagcacaagtacggctcgacaaccattattagtttgtgtgtgagccacagctttaacattcagcgagcacagtcagtagcgatgattgtccaaggttgcagagtggcgcgagaacgccaatgttggaataacggatgcatagggatgttaggcagaatgatggattcggagcgatgtggagcagcatatgtacctagaatagatatatactgtgtataagaccagcaaaggttgtgcagaggtggccggtccgaggaagatacgattggctccaggattgcccagaacggaaggtccgaggctctgaggacaaagtcgaacttacaggatggtcaggatatgagcagacagatgtttattagcaaatcgccaggcctatgtagaagatcgcagtacgtaggtagcgactagcaaaggaacaggtagcgttgaaatgtgtgtactggaagtgaaggcaaagaaaacgaacacaacaactctcctctcactctctcctcatctactccagaattcactgtcgtttatccacttttgtcaaaactctcttctataatacctctctgatcaatacattatccgccatccacagctgccatacgcctatcaaaccgcgtgtcgaaatgccgccgaaaaagacgatgacagtgcctgcaactgtcgaggattgggaacaggcagtgcaccccgatgggaccaccattgttgacatcaacgccagcattcacgaccagtaaaagcttcaatctagctccgcgatggaagaagaagacttcctacacctcaaagctgtttggcagaacgtagagtcgaccaacaaatcgcaggcacacattcacctcaggctaggcgcctggtttaacaaagctagccaggatctagacaattatccggatttcaaccggtaccttagtgcagttcagcggagagatgcgcctagctctcgtatcggtatgttctgggctgcttacgagcaacagtgtcaggtcgcgaaatcgcttcacgctacgagcaaggtgaagaaagcatacggtatgaacgaagagcttgtcaacatgtctcttgtcaacttcattcaggcagtatgtgcctgtcatcctggtctagatatcaattgcaaccccgctagggtccacttgaccttcgacttcaggcgggtcaaggacgaaaagcaggccaaagcaattgactcgagggttcatagcctgtcgtgtgaaaccgatggactgcttgagtcaacggctactggtcggatgtatgcgattctcgaagccaaagccagaccccggaaaaagcatgagccgaaagtaagttggcaagagacagctcagatggtgaccgccgcccttaatgaaaggggaacccctaagcacctccatcccggccggtaagtctatgagcgcttgcttcacggcatcatgtactaagacgattattagtgtcatccttttctcgcaggatggcgacgagctatacgtgtccgaggcgactatcagggcaggatatatcaagcatatgaaggacgaacgaaaggctcccaccagggtggacgagtttgttaaggttcagcaatttggtccatattggatccagttgagggaggacatgcaatacttcgcgaagctggtcctagccgttgctctccgagcgagccaggaggaggccacttctgttagcgagcaccgcctccgcccgcgtgaggcctgttgaggtcgtggagacattcccgtttgtactccgggttggagcaagtcgcgatggtcgcaccgaagaaacccttgttcctttgtcatcccatctctcctctctcttcaacacatccaatttctttctagaatggaccgatcaaacaagccctccgcaattggagtgggagcttcccttccccagcccaccctctctgtcaaggacaatgtcgtcgacgcttcgttgcccaccggccagtcagagaccgtgcacctatacggcgctactgtgacctcgtggaagaccggcggccaggagcagctgttcgtcagtgaggcggctcatctggatggctccaagtctatccggggtggtatttcggtggtgttcccaccgcgccatgcaatgtctggagagggtcatagtttaccattttatggtcctaacctggatgcgagaaatcgacagccgttttcagttcccttgagtcctagggttgacccttctgtgccatactcccaatctacattttcgccagagcaggtcgttcagcttctcacaatccagcaacaaaacgaactggttctttcccagaccctaatgagcgtaggcaaccctgcattttcacaggagtgtgcctgcgatttgtccgtcgactctacgttctgccaaacagctttgaggtgtaggaagtcttcttcttccatcgcggagctagattgaagcttgtactggtcgtgaatgctggcgttgatgtcaacaatggtggtcccatcggggtgcactgcctgttcccaatcctcgacagttgcaggcactgtcatcgtctttttcggcggcatttcgacacgcggtttgataggcgtatggcagctgtggatggcggataatgtattgatcagagagggattcgagtcaattgctttggcctgcttttcgtccttgacccgcctgaagtcgaaggtcaagtggaccctagcggggttgcaattgatatctagaccaggatgacaggcacatactgcctgaatgaagttgacaagagacatgttgacaagctcttcgttcataccgtatgctttcttcaccttgctcgtagcgtgaagcgatttcgcgacctgacactgttgctcgtaagcagcccagaacataccgatacgagagctaggcgcatctctccgctgaactgcactaaggtaccggttgaaatccggataattgtctagatcctggctagctttgttaaaccaggcgcctagcctgaggtgaatgtgtgcctgcgatttgttggtcgactctacgttctgccaaacagctttgaggtgtaggaagtcttcttcttccatcgcggagctagattgaagcttttactggtcgtgaatgctggcgttgatgtcaacaatggtggtcccatcggggtgcactgcctgttcccaatcctcgacagttgcaggttcagcttcttccgagaatccaacaagaaaaccaactgacccgtgtccaaattcaatgaagcatgggcaaccctggacagccacaatgtccaatgactctgcaaccgtcatcatttcccccgagtgccgagagggatctagtaatgaaactagacgcacgaatcaaagaactggaataaagtgtccaaagtccggaagataaatccgacccttccccgcctcaatgtcaagacaagtcgcaccattcgagacacaggggcccgcttcaagtccgttcaagccctgcccaggagtcctctgtctctcctagatctcctgcccatctcggtcgcagacaaagtctagctctaatagatccgacctccccgacaggcccattgcaaaataagacacagtctgaccgcgattccaagactgtgaaaagataacatagttccgaaagggccctgataccaaaaacctcagtccaatctaaccaacccatcggttccaagaagcggtccccaagtccttccaattgctaccctcaacgaagaagactggcgaccgcgaagcggttgaatcggataaactccttgatgaaatgcaagaggaaatcgacatgtactgggacagattgcgttttcaacgcatgcaagagaaacttctggcccggactctccaggcccagttgagggagcgccgagctctttgatatattctgaagaaagcgaaagctgagctcaaagacctggacacagctgatgtcaggtctatattgggtccacgaattccacgcactcaaattccagacttcatcaggaggaggatatggggggaacatgcgaggaagaatagagggggagacagatcctagtgtggattaggcgggtttggaccctgatcggcgcttttgcttcttcttttttctttggcttttaatatgactccgtgtttcttacattccggagaagctatcacgaagatcataccacaagttgttctttaattgaatttccaatacttgaactgctgagtgtgtggctagctcgtggagctagataaatagtaaaagcccctacagaaccaggtcatcttcacgttaaatcgagaaagaaaaaggtatgcacaatatgtacatctacagcctcggccccttcgaatgtcccgtatctatcccatcagaactcttccggtccgaaactaactcctgcaccccagtttcgcagtctaacactccgatctctggcagaagttcctgttctttgggctgattggcgatcgtttcttccttaccctcggtcctccggcctggtggaataaacacgttgtagtatcttgggaacaccaaaccgagcagaatcaagagcaaacagaagtgcgctaaaataaacccagcgatcaccattgggtcgtaacgtagggtataagattcaggatacgcgaagctgaacacaatggccagaataggcgcatagacataccggagtagaataggctagaaacgagggatattccagtttctattactactaacgatagtgtttaggtcacatctcaattgattatcctggatacgttagtttctcttagcgcgagcttgttagcagcgggaaatatacagagtagaatgctagatactaaaattgactaaggaaagggttctacccctagaagctagtagctctaatatccggggttataacgacgaggatagaaatagtcgagcagacgatatataacctaaacctagtactagcgctagctaccggattcgaggtactgtatatattgtaatatagcctattaggctgactctgcggaagatagaaatctatataagaaactagataaagacgctctagccgactgtctcactaataagatccttagattcgtgggttgcgagataggagagccgcgctaagagtcttggggggcatcccagagcggagatggtgtgcgatgtcgcagtcctgtaggcgggattactatcatgagcaaagattagccagcttggctcggtcatgtgaggtgacctgcaggtatctcatggtccacaacgagtggatgcagggttcggaggagtgccgaacgagctgaggtgtccgaaaaacagtcgaaattcccttcagttgccaaggggcctcctagattgcgcctagggtgatagtagaaacggataccttctgcttgcttctccgataagagttagattttaggtgcttacctattacgctggtttcataatatttttgatataggtgatataggtgattcagcggcgtgtggcaagactgatacactacctactctgtaccgctctatgttttagcttgatgttgagcagatacgtgcggaatttgtgacttctcgtccagagacctatagaatttcatccaggaaccaatggaatatactacatatcactaaacaaagctctggcttgggaagttgggcctctgaacttcgatactaaaatttcaacatcttgaaagtgagcgggacattaagtatataatgagacaacttctacttgggttcatcctgttaagcactctatgtcttagtgtaagattgggccgggccgtaaaataaggatgtaagtcgttcctcgagcttgagtgctggtggtgccggtaagttgttattaagattaagttcaaagaggaatgctggatagtcaaaagcttctcacgggctttcttattcgatggtggctcatggatgtcctaatcctgtcttgggttcatcatcactttctcgttgccctaacggtctaatgataattttaaattcattggacgcgaatcttcagcgcttgaacgctcatgaggatcgtgtggagatgggaggagaaggagtccaaggactatatagaagaaatgatatattttcataagagactgagatattatatatggagtatagaggtagatacaggattgctaaaatagatgatgggaaatgacgtcagcctcctcttatttttcactcgcccctcatttccatatgtttgtatattgtatgttattatcttcccatctcgcatttcttcttggataatgtatcgtgattctggctacccaatgccgacgtgggccagggatagatgacgttgtggaagggcgccagatttccgtcaagtttctatagtttgtccctctcttttcctcctcctatagtccatagtgaatataactgtgttccctccttctctcttcctgcagtagctttctcctccgctgacactttcccatatagtggagccatctagtacagtatgctcctcgctatatcgcttagacggttcgagcgtactctaaggtccttgaatttaaggtcccttatgaacgttacgtatattataaacctaaaccaagtttcgctgaagtattagaggatcacgtagtctaacctggtcagtaggaaattatgcacatttgcatagcttctgctttgtggtccaacgggcctttttgcctttttcttggttctcaattctattattgttctaccttctccatagtaatatacatattttacagtactgtccatgatatccataccgactctgtacctgctccttatgctaagctgaggaatgctaacaaaatattgtatgtggagttcagtagagtcagctctgcctcggagtatgtaccattgaatactggagcgggggttaatgtcccggcgttgattgcggaggagaataccacctggctgaggtcgtgaacggcgcttgttggaagggtattgccaataaagtatgcacggatggcctctgtcagccccaacgacgcaatgctgactgttgtatgacctgggcctcgtctggtcaccaaccgggacgcggtagcaagctgactctgcaaacgctctgcagaggccaacggagtcacggggtcatgttcgccattgacaatcagcaccggggtattttgctcagtgaggatggagtttgcatcgcggactttcgaggctcccaagttcgggattcttgcgcgggtgtccggaaagtggcgacagaaggataggggagtcacgtcagcattcagccaaggggtatcctcgcggagagagacattgagtactagggaagcaacgtccgccaaggagatgccactggacggcgcattatccacacactgcaggggccattcagctagagacccagtggctggagctttggaattggctggcggactggcggcagctgcattaagaatggacactattggagtcgcatctccttgctcaagagcgctcacaactgaggagataaggggccaagtagtcggaactcgggaaaaggaccacatgaatgcgctgaagatcccaacggtgatggagaacccttgagagaccggaatgggatgttcgtagagggaatcttgtaaattagcaagtcgagtggtcaggtcggcagttacatttgcaggaggagtactcagagcacagccagctggaccagcttgttcgcaaaatgacaccagatcgttgatagcatctcgcacggagagttggtcattgggaagctgggcgacataggtctcagcattggcagtagcatcaaaaacgccgtccaggacaatcctcccgaccctctccggataggtctgaataaattctaccccaaaaatggtcccgtaggagagaccccagtaattcaaacgggcatctttgccgtccaatgcatcgacaatagcccccatgtcacgaacaacgtaggccgcgctagaagtatacgaagctgtcgaattgtaagatgcacatgcggcagcaagctgggcggtcatgctgtcaaactcctgcatcgcagcgttgtaaaagggcgtgtaggattggtttctgaactggccgtacgccacgtcaggcgcagctggaagcacctgggacgcttcatactcttctccggcggtagcaaaacattgcaagacgggttgagcggaacccacaccgcgcgggtcccatccaattatatcgtaaaaccccccggtgatgttcgatattccttccccggcgccgttcacgacgaaggagacaccagacgcaccaggacccccaggattcgtgagaagtgagcctttgcgctgggatacctctaccgtggcgttgtatcgggcaagcggaatagaagctgacatcccgctctgtggctccgcatactcaagcggcactcggagggttgagcaatccaacgctggatttgcaggacagggtgaccattgaaggctggcaagagccgtagatgccgacaggcatccagcaagaaggaagtacttaacagaagagagagaggacatcttgtcttgtgttcatggctcgcatgtgaattatgacagaaatctggcggtacaacaatatatgagtaccctcaagtggtattgaactctaattgacgaaactgacaaatctctaattttaatatgcaccgcgagccgacaaaataagcatcttcaacacgttatcagcaaaatacagtaactaaactctatggcgaaagcagaaggtcaacggacgtaataaattaccatttatgaaaagggcaggttagtgcctttctggccatttattggataagttccgagcgatttccaccacgcccatttgcagtctgatccttcactcgccccgatactccttcgataatatacaccatacaagaaaatattgtcaaagtagagaacaatgtaaaagagcgcactctaacagtacacggcacggttgaaactggccagcggcgaaagggcagttataactcatggttactcgtcacgatcggccttagtcaagagatgtgaaggccgatcccaacaatatttcggccagactgagacattggagtctccggactgttctttgtccctgctgtaggaaagtgggcgcgggttggatggtgagtgtggcggagtggagtggagccgatttcttgcagtctggtttggagtagggtagtagatagtattaccctctttttcctatctatcttaatatttacgtataaagctatataatatagtatatataagatactcctagagtgattttgggatattctatttagagaacatattataagtagtaaagaaattcaaataaaatcataatagagtgagaaaagagccttagaggttatattatatatttttcttagggccggtataggcttggaataagttagcccttattaccctaagggtgagaattgtcaccctattcttacctctctcacccatatcacctatgctcaccctagagtgccgcttaggtactagggccaaattgagtattgactatgtagaataatgagcttaagtacggctgagcggacgggaagccctgttttccacaccctatggtcgtatgtaccgaaatgtatatcggaataggatatgtagtacggcaggttttagatgtcatcgactaattcttcaccgcaataataattcatatataggccaagcatatgcctacccgcccggataataagatatttctgattcttaaaccaagctgcttatacacacaagcacttccaagacctccgatatccgcggtttggaaaccaccaaagaaaaatcatacttactgtgaagacagcaagtgtggatgtggtgaatgaacacacccgtgagaatctgaagcagaagccggcaagagccatcggcgaaatccctttctcttttgcgcatcacactttagctgttccacgtcagtgtattgacaggtccagcatttgtgtatgatttctcgggaaggaacctggaagaccgtcaaggcttggaaattggccaacagaatatattcgcacgatttattggtagtcactatcgccgatttcgtcatatgggcgcagtccagttgtgatcttgaatatcagacaacctagcgcaaagatatctgtcgcggtagaccgaggagagtcaggagctattcgataccgatcttcctctgagacaagagtgtcttgtcctccaactccaattgctgagccaaagaagtcgcagagttttatggacaagtcagcgacgagaaagttccgtgtactgatatcaacatggactgcggcaatgcaatcattgttaatttgactaaacccaattaggaatagatgatcttggctcaggtgggtacccgtccgtggatctaccacggcgccgtgatcggtgatgagctaatccgtgtagttagcatccttcatctctactagccaagatatcaatccaatgcacgtgtcttcggcaaaaattccttttccaaggttggagtttatatggctcaagcacttcaatcttggctggcggtatatcttttacacactactcgacacctactaaatttgttcgaatgaatgtgataactggcatcgagtgacacagatactctagatcaccattggagagtggaacaagcagacaatcgagttgtgtgattaattcaataagctaggctataaggtaacatctttgcgtcgtttcccaaaaaggaaaataattcgccctcgcggagggatcccgacggggccatgctaagcttcacgcactgacccccgaaggtggctaattagacgattatggcgtaataacatagtacgatggtcgcagctgaaacacacgctaagctcaaggagtctccacagttctaagagtgcttggtctataactatttccccttaaaatagtgtgattctctgaaagataggatcagctcgagattgttatacttacaaactgcaaatcgagaatctgccccgtttcctatgggtatcacatacaacttggaccgaaaacagggactttatcaaagtataatcagatacgtcttctccgggcgcgatgatgccatttcggccccatgccgacgaagagaatataacctggaagtcaagaactatgaatttcagttatctgaaaagatgagtacaatatcccctagcccgaaaaatgccaccagcacagtggctcccgtcgtcgagacccacctgaaagaggagagatctctagtaagtatcatgacctctaacgcatggacttatagactaacggctgcaggtatggcgtctggatctgtttttcttgaccattggttttctaggctatgcattcaaatatctggaccagacgaatattgtgagtacgttcgcaatctggaaaagaacacactctgactgactatctgataagagtaatgcctatgtctcgggaatgcagacagacttgaagctatatggcaatgagctgaactactttacaacctttttcaagtaagttgttcattgtttgatagtgatgtccctgctgatccgcaatagcatcgggtatatggttatgctgtatccctcatgcatcataatctcccacatcggtccgtcagtctggctacctgcctgcgaagtaagttgaataaatccaaggcttatatggatgggattgaatatactgacaacagataggtgatttggggtgttttgacttgctgtttatccactgccactagtgcaaagcaggtaaatacattcaaacccctcgataatatcttccccaactcatagaatcctaggtatacggtcttcgattcctaatcggctttttcgaaggtgccacttggccaggttattttactatcatcaggtgaaacgcacagctgctctgccaccaatatatatactgaccttgtccagccaatggtatctccccgaagaaatggctcttcgcatgagtctgtataatattgcccaaccggtcggagccatgttatctggtgcgatgcaaggtgctctttcaacgaacctcgagggtgctcttggtcggagcggttggcggtgggcgtttatcatcaatgtaagatatttggtatctacaatggggaacacgtcctaatcttctagggtgtctgcactatttttattgcattagttgcatttgttctcttgccaggatttgtatgaacctgtctactcctctagcttccttgcagcatgctaacagaccctatctagcccgatcgccccaatccgcttgccaagatatacctcaggcctcgagatatcagtatgtatactattctggaatcacattattagaaatacatctgctaatatagcaatgaagtcgtcgccaaagagcgaacccgtcggatcaaccgcagtccccaggtgggaatcactgtcaaatcattcctgcgcagcttcaaattctggcatgtctggttatttgcaagtgagtcgactatatctattcttttcttttccaagctagatcattctgacactttatagtttcctggtccattggcacgggaactacacctgcaaattacttcaacctctggctcaagtccttgaaaaaccccgacggaacgaagaaatagtaagaatcagccctcctctttctggcgacaaacctgacagtgtcttcagctcggtcgctatgcttaactacctgccgatcgcgggccaggctatacaactggttgctgagcttttgttcagcggcttcagtgattatctgggaaccagattaccatttttgcttcttcactcggtgagtatatctggcgagcagagtagagcggcacctatgatactaatttatattttctaggtcataaatatcacatctcttattatcttgatcatacggcctgcaaatgaacatgcgtacatggtcggttggtatatgaattacatcggagcgtgagtgctcccattctactcaaaatttgcaaaggttttttctctgactgaaatagtgtgtcgactatgctactttgtgcatgggcatcttcctatctagagaaagaaccacaagcccgaacagtccttttcgccactggaactctcttctcatacctgttcagtgccttcttgcccattgcggcgtacccggcttcggaagcaccccattggagaattggtgcaaagctctatcttggtctctcttgcttggctactgcactcttcgttgtcatccatttgattctcagacatgaggcaaaacgagataagagaaacgagacggctgaatctaggtccgaagaatcactgtaatgggagtctatccgtgaaggggatgcgatatcgataggtagagcggctgtgatgcatatatattacgtgactacaatacgaaggagaaccgatcaatagaatatatgaatgatagccgattataatctaactgctgccatacaactctctctagttatagctactagacgatcacgcacaggttatgagatcgcgaaaccaggaccgaaaatacaccagtaactatttggtggctcctcgcacacgtatcacgtatatgggcgacgaatcgtgccactacgacaatgggactttttggctcaccgctctaatcaccgccttagtaattatggttttaggacggttccatggatatctcctttggtaaacactgctggcatatggtatataaaatcgaaataaagcaattgagagatgaaaaactaagagatcacctgttctaccataaagctattcagagatcacctgatttatcattataaagattcgagagattacatgatctattacggagtatcatgaagctattcggagatcacttaatctatcactatggagcaattgaaattaattctactaccactaataatagagataattaaatcccaaaaacggcattttaatactagatactacttactatctaattaattaaatacaaccggtattttacgctattcatggttcaattgtacgaagaagtgatttaattttgacgatatagatcagatgctacggagtacagagtagtccaagaaggtaaaaataaaatgttgtgcgcaaatggtaaggtattatataatcagatcacgtgcgttgccgactaataatactggcagaaataacaagatatacaatatagtcgtaagagttgggggaggggcccttttataccccaaaaccacgtgccttcctaaaatgcgacagttccctcgagccttctttgtcaatgtcaatgtcaatgtcacatgcattgcaccttctttgtttgccttctttgtttacacggggaactttcaatgtttgggaaggaacgacattggcttcagggcatcaagtgcaattgaagtccgatattagatcgcttagggaatgggaagattggaaaattcagtccaagcctaaaatatcttccaaaaagatcaaagatcgtgctgaaattgttgaaatctgtaccagctggatcgatgagtggcgtcaccgtcacccccaacacaagaaccctcccattgctgctcactatttcctcttgctcatctttatcatcacgatgatcgcatggtatagataattacctctctatatgtataattgtagtatccctaggtagcagctctatgaatttctttattgccagcgatgtactcgcttttttcaaactcaacctgctatgaggatcatatactatactaatacatctttcagtacatacgaccatagggtgtggaaaacagggcttcccgtccgctcagccgtacttaagcnnnnnnnnnnnnnnnnnnnnnnnnnnnnnnnnnnnnnnnnnnnnnnnnnnnnnnnnnnnnnnnnnnnnnnnnnnnnnnnnnnnnnnnnnnnnnnnnnnnnnnnnnnnnnnnnnnnnnnnnnnnnnnnnnnnnnnnnnnnnnnnnnnnnnnnnnnnnnnnnnnnnnnncgccggtgagttagtagttgggtgggtgaccaccagcgaatcctcactgttgtatgtttttgtcttgttttttatttactcaaacttttgatggctcaatccacaggtcgctaacttcaaccacgagagtgttggatatgccaacgaaatccactctagcgtctagagtacctccaaacaagcaattcccatggttcgccccacatggtcactttaaccctttactcgggcctggatcatcttccctctcgtcttcatctcaacttgctgatgacttccaggaagaaagcgaggcttacgagacttacgatacccccgcatatctccagaagattgtcgatgatattcgtaacctggaaatcgtgtatttcaccggtcgggatagtgagtcgattccgttttctgggtggtatgagtagatctatatattaagttcaaacctcgaaccttcgcgcttagcgatctagcaaacaatctatctaatgaagtaaacaatgcaaacagcagatagttgctgatccgtagagtcatagaacagacaatcatgcagacggtaataaatgtcacgatctactatagatcgctatcacatgcttcatgtttgcttgcttgctcgtttgcttgcttccatagattgtttgttaaatagctaagcgaggtttgcaacgtttgcaaagtggttagcagctatataacaaggttgtttcccattatccacttacttactcttcctctccatcttcggtatttcgttgaatacactctttctcttctgatcgacttggcgcttcgcagtccacactttgataggtcagggcgtcaactggccctgcctggtcttggcgctttggtcgctcggcaactcatctcatcacattccccccccagttatcctcatctaaacccactcctattcatcatccattttcaaatccctcatcttacgaaatatgtcttcaaaaattcaagtcgtggaaacacgtgaacgtcaactcgagcgctgggttctgatgaaaatcgagcatgcaattgagaaacttgaggagcataaactcaacgcgacagaactcgagaaatggaaaattagcttctccagtatgagtctcgatcagaactcagagcttaagccccgcttcttcgcaccgaaacctgacctcccgccaccaaacgatgagatactcgataaggccgctgagcctaatgatagtgatggacgctattatttaggtgcatacgatatgaacaatttcttaagctcttatgccttccaccaactaggcctccgtgataacgggccgtggcatttgatagagtaagtctattgctgtctggagctatatcgggccatcaagggttgggtatttgtcatttcctgtagaagcaggctgtgagcttcatggactattatctaacgctagtcgatagccctggtcaatataacgcttacaagagcctttatttccatgggtctccctcgcttggcccgtctcctacatttggcgcttttaagataatagatagtcccggaaaggaatatccgcatcttaaagcagtcatatataccgatatggaggcggatgacaaaacttgtttccgttcagaggtcttgatcagccttcgcctaatgttggcccaattgagaaaggtgcgcctgatgcaccataagatcgcaccggtaattatcgattcttccctttctcctattcctttattctatgcttctggggttactaactaagtattctataggtcttactcgtctcgttgatgggaaagcatgtacgtatactagagtcctattttgatggcaaattgcttcaaatgcgctctactcgtctttacaaaatctccgactgggactcgattaagactgtgtacatgattctcaccgagtatttgctcggccctccaatcagagataccatctaggctggggtatcttcttctattcgggttggcatgttgaaatgattgaatgaacatcaagtgacttgaggagatgtccgacggcccagccggggatccacatgcgcaatgaacagataaaactcccatttcccccagaaaagatagatattcaagcaatacacacatcatgaaacaaccaatctcattgttcccatactcagtaatctaaacatcaacgtggcataggaggcttcagggaatgcactcttcagttcaaactcggagcctgccatagcccgaagaggctacgacagagacaaaaatctttcaatctcaagcttcttttggggcgtcatatatataacagacttttgcctttggccatgatggataggggatcgcgtttccagataaggctcaggtgcagccacagaggactcaggccctccttaagcctacttcttgcgctgataggccaaataattctagtgatgatgattccccaaattcacccggaccagtcgcctcatccaaggcaaatggagatctgtcagggtcgggactcctaggaagatgcctgactaagccaagttttgcagcgccattatcaagagcaaatatatgagtgagaaatggattccatactaagaagtacagattttgcaagataaaataactctaatatgtcaaaagagccgtgtgccttctttctgtatgtacaacatatattgcagggagtgtggccacgtgattacagcattattgttttgggtctggtggggcggtgtaggcttgtttactttgcgttaaaagtggatacaaaccccaccttaccccacctgggctatatatcgtatcagccgactgcaaagaacctcatttcacaacgctaggccagtggagttgctgttgaagggtgctccagtagtattgagatggtatcttgggagtgtcacgctgcggtcataagttatataatagggatatggttgagaatggcggccagagtattatttgattgatcacgtgcacctggttggtctgtaaataaaacgagcgcaccttactcttcacgtacatacccctacatttgagatttcccatattatatctctgccatcatggaatacgataggcgtcttgaccttctgcatgaggtagaagaaaacatctggcttgacaaagttgtaaaggcccgctctgtggagcttctgcacttgggtttcaactttgcacccacagcaactcggtggccttcctcgtgtcaacagtctctctggcagatatgcagacgaaaaggttgccatggaggttgaggctctccatcttatctgccagatagacactgattgtgattgagagtgcatgagaagtttcagaaatgcatcatcagcggctggctacacgagcctatcatctcaagggaaacccgaatgttcatcaaggattgatgcacgtcaaggcacaggccaagatggccagcactatagggcccattacttctccaagggcgcgaagaaagcgttaaaataatcaatgttattcgttgagaggtgtgctgattatgcactggccgccatgacaaaaatcctcggcggttagagaagttggatagatcaccaacaaaaatatgattcgatctcatgaaatgaaggatgaaagattaaacttcaagcatgccaactctggaagcacagtggtatagtggtcacagatgaggttggttggcccacccgggcgtatcgcagtggtcatgtgcgaaggggcagagcggccaaaggtcaaacgcctggtgatcgcactcagactaggggcgccaatatgagcattgaccatgggaccaacgtgagaggtcaggagggcccccctgatctgatttctgaatccgtagggttgatgcctaaatgtgcctgaattatgccttattttaaactgtatattataccacctggggcatgacagagggcttaataagcaaagtatctttccaaggttccaatccaaggttgaaaaaatgaggctattcccaccatacaattatccgcatacacccatttattcataggcgctaaagctattgcgactgtacaaatgatttgtggggtggaaatagcttcaattcaatggtttatgcggtcggggacgggtttcaacgccgggattcgaaaaacctgatgatttttggggtcgaaatacgtagcttaaattttgggaagttggagatttgtaggaatagcttcaacttacaatacacggtatagagccgtgtcgaaagcggtctatagtacaggcatattcaggcatattcaggcatcaaccctgcaaaatcagccaggcattcgacctttggtcgctctgccccttcgcagtcatgtgatgggaggctggtgctatccgaacgcgacttcgtgtgaacttcgcttccttaacaagatgtacgcacgcagagcttgcgagggctttcgatataggtctcgcgtactcccttcttctagagtcggacaagctgtcttgacttgtattccatttcagaatactgtcgatatggaatggttacgacgtttgatctcgcgccagacgcacacgtcctcgacgcctgtttccccccggtcgcctactaatcctaccataagactgcgatgaggagagtatgtatcactacacgtccggtcgatggctttggaatgagaaagaacagttgtcccgtcgctatgtcaagttcaatctggcagagctcgtcaagatcgcaacccgcgcgacagggtcaaagtcctgcgtcgaagtgcagaaactcccagaaggaaatttcagcaaagttttcctactcacgatggaggatgggaaggaagtgattgcaaagctcccgaatcctaatgctggaccgcagtactttaccacagctagtgaggtggcgaccatggactacgtgaggaacactttgttttatttcgcgacgtgctattttatctgaccccgatttctaggtccggaatgttctgaatattccagccccaacggtgtatgcttggagcccttctaccgaagagattggagccgagtatatcattatggagaaaagccgtggggttgaacttggcaaggtatgggatgatctgccgggtcctgataaacttaagattgttcatcgactcgctgggtttgagaaggctctcgtatccacccggtttccgatgtatggaagcatatattatgcagacaacctacgcaatatcgatccagatcaggtgattgagcttggagataagaagaacaccgtgagtgtgaaatttgcggttggtccgaccacgaatcgaacgttcttcgatgatggcagaaattctgttgatgtccagcgagggccctgttagtgtctccctcggatcgctggcgaactgtcctaatggatgttttacgataggggcatctcttgaagattatgctttcgctcgtgccaaccgtgaacttgcttgtctgcagaccttctcgaaatttccacgtccacaaggattattctatgggccaggtcaataccagcccaccgctcaacgaaagcacgaaacactgcaaaatttcctcaagattgccaagtttctgtcgccgaaagacaaagagatatctaagcctgttctgtggcaccccgatctatacggagacaacattttcgtgaacccggatcagccaaccgagattatttctattatcgattggcaggccgtgaatttgtcacctctatttcttcaggctcgccatccagccctgatagaattcgaggggcccatccctgagggattgaaggcaatcagtctgcccgacaatttcaatgaactcagtccagaagaacagctcgaggcgaagaagcttcgtgctgcccagtctctctacaaacattatgatattcagatgatcgaggactgccctgagattgcagctgctctaaagttcaaaaattcgctcgctggccaaatcatgggtctttctggctctctcttcagcgatggggaacccattgttcagggtatgctcataagactccaggaagaatgggggtctcgtgttgggtcatccattccctgtccactctctttcaccgaggaggataaggaacatcaaaaggaggacgagacaaagtgggctagtggtgttgaactaatggaggaattcctcggtcaagtcggtgcattgggacggttgggtgaatcacaatagctacgagcacttcaaggcgcggctagaagaatgccaggaagagttctggaactctcactccaccacaagtgaagagagaaatgagtggaaatcagtatggccttttacagacggccaatgattttcataggtgggtaggtatatagcttaaataggtttgttcaacgccgtcggtgactttctagttacctagcacttcatggatcttaggtagatgatatacttgatcaccgaaacattcgttcatatgcgacactgtcacaatgggctttttgagctacaagacatgcgcatgtgtatgggtccgtgagacaaacccaagctacaccttccaaagttaattccaaggttagttttctcacggtgggcgtttagttcttagctaatcagccttttcgatgggagtccatctgataagcgaggacttccatatcggacggatggcggaacggaacaaatggcgactttacgacgtcattacctgcctccatactatagaaaaactgtccaaaggctgcaagtatacgtgtgccacagctatatcattatctgagacccggtctccgattatgccattagcggtgcggcgtgaccggcaaaatccatagcagattatgatctagcgcgctggcacagactctgtacatagaagttgccctccagggctatgtggattgatgatgtcatttttgccttagtcaactatgacctacggggtaactaactatgtatggagtatctaggtactgaagaggggacccctgaggggtaccgacagccctgcctgcgaaacaggtgtgagagcagagtcgtcactgggagtaatagggtgctagagaggagaacaccatgaggtgactactgagaatggaagtggaaaggtgtctgcggtgctatctagttatgcctcgggagtgcttttatgtcacatagccgcttagtcatcctgctctggaaacccccactgcagtacctaggtacgcttgtaccttacacagattgccgtggctccaaggttataaggttataagtgatggtcacttgagattcccaattcaactgaactcgtgtaggtctgtgcatcagttatgaattcggtttatgtccgaagatctcccgaatataggtattccttgattggctatggaggtatggtatgtaatgtaggtcccggtgtacataggtgtgtgtccactgtcccctccgttcctaacttcatcttattctaccctcggaaccagcagggatgacttcatatgtagctttcgtgtgggtttcccccgggtctttaagtggtaatcaggactcctatccacagatatgggcaacggctgtatgtagttctgacgtcaggtcgtgtggagaatgccaagaatggcagggacctctggatcgcagatcgaaattgacagggtacttttattgtacttcttttagggatattcacacggatattgagcaagaataacatgagactttaaattgtatatatataaaaaaaaagaaaggttctacaccttcaatctcatcgatatcagccctaaatctcgatctatactgtgttatacgccacggccgccaccactctgtggtgtagatccactataaatccggtttcagcccgtggagtccccattaacacatacttggtacatacttcctacatataacacctggagaaggtccacaatcttttttttttctccttccccctttgctccctcccccgcactcaaggatgtctaccccagggcaacgagagcctcaggctgttcaccatgagaacaccgacagtgaagccagcgtgcctgtcgatgtgtccgccgcaattgaaaaaaaagagagcgagcgttccgatggaaagcgcgagctgaaggaagatgagtgctacgagattctgggatactgctggccacgatggaagaaatggacctatctagccgcggtcgcgtgcgttcaggtctctatgaacttcaacacttcggtctaccctgctgctgtcaagggtcttgccgaggcttttcacattagcgagcaacatgctcgcacgggccaaatggcttacctggttacttattctattggctgtgagctgtgggctccttggtccgaggaattcggtcgctggcctatcctccagctctctatgttcttgatcaacatttggcaactacctgcagcccttgcccccaattggggcagtgttgttgtcgctcgtgcattggttggttttcttccttgctaagctagcagtttaacaatttgatgaactaacatgatatttagggtggtctctctactgctggtggtagtgtcacactcggtcttattgccgatatctatgaacccgagacgcaacaatttcctctggctttcatcgttctgtcctcttgtattggtaccagtattggtggtgtgattggaggaccaattgcccgttgtaagcagccactactctcactctgcaacattttacaacctagctaacacgtttgacacttagtccttgattggcaatggttcttctggattcaactcatcttcgggggattcacccaacttatcatcttcttcatgcctgagagtcgttcgaccattatcatggacagagaagccaagcgtcgccgcaagaccggggaagacccaaatatttacggacccaacgagctcaagaccccccgtgtctccctcaaggaagccggcaagatttgggcacgtccattctacatgtttctgcgcgagcccatcgtgctttgcctatctcttctgtccggtttctccgatgctctgatcttcactttcctggagagcttcgccatcgtctacgagcaaggatggggcttcggtaccctcgcacaagcgtgggcaattattccaatcaacgcagcctacttcatcgcctactttagctacttcccgtggttcattcgtgaccaaaagctccggcttagacatggcgatgccgccatcccacccgagcgccgtctcaagtggctgctcttcctcgccccactcgaacctattggtctattcggttttgcctggacatccttcggcgactcaagaaacgttcattggatcggatccatgatattctccgcctgtgtcggtatcgccaactatgccatctacctctcgtctgttgattatatggtcgcttcctatggtgtgtattcagcttctgcgaccggtggtaacgctttcgcgcgtgatcttctcgctggtgtctcggccatgtacgcgacgcctatgtacaaaaatatcggcaataagtggcatgtggagtatgcaagtactattctggcttgtctttcctgtctcgttgtgactcccatctatgttttctactggaagggaccgcagcttcgcgccaagagtaagttcgcctctacgcttgctgccgacagagagcacaaccatggtaggcgtgtcagcaggatcagtgtggagcctgagtattgagctttgatcaaacgtgcagttgcattattagaagttttgcatagatatcttgcttttcatgcgttatgtatatatgactcgccttgggcgatcagagaattttagacctcatgacaattagagctagacccgaaacaattttatttcaacatactactccgtacatatttttagactcagctttcattcacatttaagggggaacgtatgatgaacaacatgcgataagacgcaatgaccaaaaggagcgttgagcagtttgggtggggaagtacacgatggatgcagcaaggatacagtggggtccgctattgccttccacggcggaggtagatgcgatgctctttcaaaccctaatcacatgatctgacaagctgaatgatatcacagcgtacagataccgttctgaaattacactataacaataccgagcctttacctgatacctgtatgaaagttactcaagtctcgaactgaggggcttggcagactggaatgttcgatgcaaatagagcaaacttgggtcgcacaccctcctatcctctcctagccctacccgggattgtaccacagatcgactacagtcaagtcaggtaaatttccttccctttgagtaggagaaaggcgatgaatacgatgggtatcctcattatgtttgctacactatcgcctggaaactggtactcaaccgcaaaacggtgggtaaagtgaccgaagacgacttggtcgtagcccccagtgagtactaggacggaacgttgaaggcaaatgttaaggacatattgcaaatgaaaaagaagcgaagccaacgcgttcgctctgaaggcacacctgtcaccgtgtcaacgacaaaatgttgaaggatttgagaaattctatagttctactaacattgattggaagccagtggagaaacagctacgtaagttacgtaagtagagcaatgtcctccgtatgggtaaaaagattagagttctcattaccttcaactacggccacgatgataacgatcaggcgagaccatcatcacggagagtcaagaagagaggccgcgtgtcggcaattagtcggatgctggctgagcataaagcacatattgatacggaagaagaggccaccggacggccttcaacctggagtctcgtgtatgatcgtatgcgatgtgtcattcgctcatatccactcatgtctgattggtgctgggaggatccaaaggacaagaaacattataagcttagggccccgtaccttgaacgactcattaatcatgttgacgaaggtggtagtctaaatgaccatgatgatgtccctagtgatatccgtcgagacctcattttagaaagccagacaggaaaaaaacccccaaaagggtagcgaagtgaccactggattgtcatattccccgatcagtatcaatgttctcctagcataagctgcgcatacttcgacaggcgctttattaccttccagaccagtctctcatgagagtcttatgatacctgaaactcgagagcaggctatgaggtaatactgtaattggctggaatcacgcgccaatgacgaagattacaaagctgatttccgaaaaacatgccaggtaactttggaaaatcgcctagaccttgaattgatcctcgacgaccctgatgctggcttcttcgttcagcgaggaattcaaattagaactgctcgtcgttttttgcgcgacatcaacgaattgcaccgaaacattacacatgaaccgacctctggcgagattcttgatgttgcagggtagagccaatagctgttatgttttgttatcctatgcggctagctccacataggattgactaacagcatgttatttctttgggttaaggcgtaacgtgtattgcatttggttcataatagctcacatttacatcattgccctgcaagattattatatacaggacgtcccgttcctggtgtcaccacctacactcttccattgatactaccaattgaggcacttttgatgacattagctcaatgcacaaaagtgagtggtgctgctcgtcgctgggttatatcatgccatctgtaatgattctatgcaagcttaatagaatgggcaattcaatagcaggggcagagataaagtctttgcatttgcacaacagcacaggaaaacccgaataagggaaaacctatgccaagggagataaaaaagaacagcagacattgaagcaatagaggataaagcttggtagacaaaactcgctatcaaatagacgtcggtacggtaactgccatgatatcatataccgcatttatcttggtcaagtctttcagagccactgctttgcagcctgaagatccaatagctcccactggagatcagatcttagttaacactgtattacagtgaggatacccccagccaaggtagatagatcacttacatcgtaatcccaggcaatcaccaagggttggcaaataacaagaaggttaatcgaggtcctgatgtatatgttaacataccattggaggatagtctggaacacagtcttctcttaccctctccagcattggtgagttctttcaagtcactttcttagcgaatttgacgacaacacttctcccccacttccagagggattcatcttccagacatttcttcgcaattttgcaatttgcttcgttcccatacttgtctgccatgtccatgttgctcataataaagcccatcgctttatcgatcgcacaagacttcattctctcaagttcaggtttcttgcagaagtttgtccttttctccgccgcacattgagccacaatcgcatccgctaacggctttattttcgctctgtagtttggtaatttcaaccccttcttttgcaatttgtcccatagaggtatgagtacctgcttctccagaaatggccagtcatctgctccaggactcttgcccttggaacagacaagcttatcgaagcttggccatatttctgtctccaccttggcgccaacccccttcatagtattcatgcatatctcgtgcgggagaccgatactgattgagaagccagagaatataagaagaaaaaaggaaacaaatctccactgcattatgatggttggtatgggttttggatttgaaagtaacagatgcggattgttgatatgtctgatgatgggagatcagggctttatagcaaggctttctttactacgtagagcattcaagcgcgtgagccactactggtcaattgagatgggatctacgacgtaacacaataaagaagatcccttgcagtcacaatattgtgattcaatggtagaacgctgtatgtggggaatgcgataagcctgccaggactgctcctctgcgctttgattggacctcggcgtgtgatcgggcagccgatcttatttgtagatgctcagtcaccgagaagtagcgcagggcttgcgataactagttcaccctgtcctttgtaacttcgtgatccgatcggcaggactattgatttgaacaagtagaaaagcccatccaatgaagggtctcagacagcgagcgggcgatcttgccagatcgccagatctacatggtgattccgggtggttctatgtaatattaatctactataacgatgactcacttacgacagtatacaatcatttacataaacggttctaccagaagtataagatggtgagctaaaagggagtagcgttgttcgacttattttccaggaattgagtgcgaatagtgtgaagattcaactgatttcgaagactactgtaccaagagatacttatttcagatgaactcagtagtggcgaaccctatagttagttaactatgctgcagtttccttatgagtaatacagcagggcgatcttcaagctattggcagagtgctggaccacataagtgactagggagttattacgagagatttggattcttggaaagattcaacttctgcctttctccacccactattgattttctctagcgctgcaaccaggggcaagacattgaactcaactatcacatccaggcttggcgggtcgacttggcgcagaatacccctgacatgtgtcaatgtcgcattgaattctagtttataaaaatgttaggactacctactagcgtaccctgaaatggaggtatcgaactagagtggaggttcccaagatggctcatgcaattcattagactaattgctaaggttctaatcccatgtgcgcggtgtgtgaataccccggcgcttacttagcgagtacgtcgagccatacgggccagttgtgcaggtgaccctcggggtcgtaacaaaaaagaagccaatggtcgacaaccaaatgtgacagaatgggaaggggaatctgtcgagcgacagagagattctggccatatgaacagaaatgatcaacgaaaccttggcgggctcagaaatgaatgatgaagtgtattggtcgagccgatttcgagaatgactataagtaaggcaaatcactcatgctcttctaccgttatacctgcatgccagaaatggcctccagcgctttcattcttcgcaccaacatcctgaacgcaccgccgaaggaaagcgtgaaacccccgatcgcagtcttcttcatatgttgaccaatatttcttgatatgcgccttaagttcggcaaagaattcctcgatggggttaaaatctggtgtcaagtccagtggagaccaacccgtccgcctataacccacccgtttatcgcacccagactcattaacgaaaactagatgaaacgaacgcaactttgacagtttgtgctgataaaaatctcgtaactgtggatttcgttcgcttgctctctgctatgctttctttttcgaccacccagcccggtatagtgctcgtttaatgctggatatcgaaggtatcacgttgaactcgtcgaatacgaagatagccatctcctcaacatagagaccgggtttttctgcgaggtggtcaaccagggcatctaccattacttatgtgatactcgatgggcggctgggagcaattgggggagacctggcactgccgaataaccgcatgttctttcggatgttagtaacagaacgctcgctgcatttggctacctggccatttgtgatgtggtatgtctctttttactgcataacatgtgaacaataatgtcacgctgccaggaatcgatatttcgcgccatctagattgggaggatggatgatatactgggaggggggaactcgagggagaggactgcgtgaagggaactatttttggagctgtaattaaacacgaatatacaacccactcctgttttatacgagtttggtattataccttcgatatcggaacattgttacaagtgttttggctaaccaaaataggagtaagtatcatgtgattagggttgcaaaaggcatctcatatacatccgtcatggaaggcaataacggacggcattgtatgcaatcttctatatccacgcacttctatcatattgacaccatttatttgtatcccctttctcgcgcatccaacactccctaaccacaccaccgacaaaatgatcacaagcacaattgaaatagccgcgccgcctgccaaagtgcgcgagattgtacgtagcattcccaaaggccgaattctaattccttgctcgacaagctgaccagttgtcgcgcccgcagctcctcaacttctcagcatacccggaatggcatacggaatggctcaaggggatcaccctcaaggacagcaccaagaccccgcaagaactttcctcaggagacaaaatcgaagtcaacatcgagaacttcaagttcgtcgctgaagtcaaggtgagaacaacaaacttccccaaagaaaggaaaggaagctgaagactctcaacgctcaaggagaacaccgagagcttgttttcttggcaaggcccgcccgtgtttacaattgctggtttgcataaattccatatcgagccggccaatgatggagcttcgactgttttcacgcagtctgaggatctcaagggtctccttgcattcattatgagtccgtctctgcttgggaagaaaatgcgcgcccatttcgatatcttccacagggatctgaaggcccgcgctgaatcggcataatttaggggggctggatttgttgcacacgcacaatctgccgttttatgcacgcactttcggtttgggtttgggtttgggtttgggttttgtgttatcagcgccttacctccactacattcctatgcacgacgtatacacacttgcaggcaaggtattggctcgggagatgtatatcctggtcaccgtttcaccgtctttcagggatggtagacttggaagcttaatgaaataaggataaatgaatgacttctgcgcaaaaatgaaaaacacgccttgtcagttcatctggcctgcccaatgacggcagaataagcggtctcatattaaattcgctatattgtagcaatggtctcgccgacaatggcgcgatggacttgaccggtcgtcagaccgtggtacagttgtggcacaccttggattgcagcctagggaaaccggttacacctcacacctgtggccctgggctataccgagagacgtatagcaatgtgtcacttcctcgagtatgtagaagactgacagaccgagggctgagtgaatgcccacttggcagaccaattaagctgtgtttggattgtgatgctcattatgacagtgttgccaatgaaccttttttcggtgatccaggctttttcacacaagccatgctctgcccatagaaaatgttgaataaaactgtatctcatataaactcaacgctactgctgtatggcgagaccgacattgagaggtctgataaaaccgattgatccatgagattgaagacagtgtcccaatgagaccgaaagaggtctgcactctgcggtttctctaaccacaaaacattttggatgtggacaagggtgtcactaaagttgctcagttgtagagcagcagctatatctcgtgccctgtccatgaaccaccgatgatgagtcgtgccagctgaagccaccatcccgaccgcggcaaaccagacatcaagtgagtcaaatacacgacgcgttgacgccagatgctcgaggtgctccataaatcggatgacaatcgtattcagtatgactgcatgcgagtaatatgttggtccctgagcaatgaacatgtagattatgattccgtagcgaatggattccgtcatcggtgatggcggcggtcttgttgtaacctgggcagatagtaggagtcggtgtatgacaaaacaggtgaggtcgtgaagttgtgtggatgggaaaggtatattgcgcgctcgccggaagatgttgcgtagacgacggaagacattctcaacggcatagtctacttcgatggtattgagatcaaatatttgatcgtcaagcgcggtcgagtcgaactgccattctgcaataggggggatgccatctccgatgccgaagtcatcttgtgtctcgaattgaggatgacccatgatgagcattgataccctttgcaacatgtgaatagcgattctatgggtggcaaggagttggcttaccagctaatcattctcgcggtaagcgggcttgtctgccttactgcgttgatgccgcctctcatatcgaccagctttttcaacccattaacatgcatttcgccaacttttatattgcctttgccgaactaagagccacataatcagggatttgttcgaattctaacacagtagcaaaccagggtgctgtagtgtctcacctcgatggttgccaaggtgatgactgagttcatagtcccatcttgaacagctagtgacatatattcaacttttcgtcgtagtaaagccaccgagtctgccatgagaagttcggaagtctgaaagcccttctgggccaacaactcttcgtcaagacatgctgtctgtagagagacgtggaatagtgcaggatcccctagggcaagtggccaccaagagatcagaaacggatttgaagtcgcattaaggtcaagagggtagtactggaaggcgattttgtggaggactaaatgggtaagctaagctttcctcgacaatgctcgattggcggcctacatacagctgtatatcagacgttggacgtgttcccgaggaagtctagtctgtggatacgaatcaaaaggatcaagagacccgaatctgtagttagttaaagtgccagatccatctagagcgcttgttgatgtcccattctgccacccggaagttgccggcccggtcgagggttcgtttgcataggcgcactcgacttggcgtttgacgcagcgggaacagcgcggtgtacgaagatcgcagctggactttgatttggcacacgcgtcacaggaccggcggagagattggcgcattctgaaaagatatattgtgcatccaaagggggcctgtgttcgctctaggaatagctcaagctgggccctcacaccgcttttgatctcacgattcgaatcagagttggaacggcgcaaacgtagcttgacaaaggtcggctcaatgttgaagtttccaggcgattattccgttatatgtgggacctcaggttcaggtcccgagtgcgaatcgaaaaaggactagaccccgctctacccctgcttggcatcggagtctagtcctaattgggtaatttgcataatctgtggataactatctgggcccacaagtatatcatgccattcctaagcaacactgccgtacttgttaggtgttctctgtcctttcagaagaagagccagtttgtcaacttgcccctatcatctaccatcatggactcgaatatggcttttgagatggccaacacctcaatcgcccagaatgagctgccgcagatatggccttccaaccaacctcagtcccaaagctacctgatgacctccttgatgaggttgtcagtttggcaatatgcagtgacattcctaatcgccgtattagtctatgatcaaggtaggctaagcctttgagactataagaactcgctgatgccgtctctagtgatgtatatcaaacggaaaggctctatagctggacctccactcaagattccgctcatgggcccctttatacaagctctgcatccgaagtttgaagggtatcttgcgcagtgggcaagtggaccactcagctgcgtatctgtcttccacaagtgagtgctcacgtcttcgtctcatcgaactttatcaaaccaatcaagctgtccaaactaacgcaatttattcagatttgtcgttctagcctccgatagagacatagcccacaaagtgttcaagtcgcccacatacgccgagccatgtatagtgccgatcgcaaaggatatcctaggccataaagcatgggtctttcttcagggtagagatcacaccgagtaccgcagggggttgacgcccctattcaccaatagggctatggctacatatctgccggtgcaagagaaggtgctaggcgattattttgacaaatttgtcgccgctagcaaggcgaatcaaggaaagcccaaggaattcatgaccatgtttcgcgagatcaactgtgcactttcttgccgcacttttttcggtgattatatctcccaggccgcggtcaagaagattgcagacgatttctaccttgccacagccgccctggagttagtgaacgtgcctctgtcgatgtacattccgttcaccaagccctggctcgggaagcggacagccgacgctgtccatgccgaattttcaaaatgcgcggctgcatgcaaagcaaacatggcgacaggcgcgacgcctacgtgcatcgtagaccactgggtgctccatatgatggaatccaagcgataccacgaaagaatcgccgcgggggaaacggacgccgagaagccgacgaacatgatccgcgagttcacgaatgaggaaatcggagagaccttgttcacattcctctttgcgtctcaggatgcgtcgagcagtgccacgacttggattttccaaatcctggcccagcggccggacgtgcttgataaattgcgtcaagaaaatctggacgctcgcggtggtgataagaacaagtctttcgatcttcccatgctcgagtcgctcacctacaccaacgcagtcattaaggagcttctgcgtcaccgtccacccgttatcatggttccatacctcgcgacgaagaactttcctgtcacgcccaattataccgttcccaagggcgcgatgatcatcccatcctgttatccagctttacatgatccgaatgtttaccctaatcccgataacttcgatcccgagcgttggatatccggggatgccgagtccaaaactaagaattggctagtattcggtgctggaccacacgattgcctcgccaaaaaatacgtgccgttgtcaatggctggtatgatcggaaaagcggcgctggaacttgactggaagcatcatgccacagagagatcagaggagattcgagtttttgccaccctgtttccaatggttagtactgctattgatccatctcaaggaccattccgcccgtatcttgtgctgacatttgacataggacggatgcccgctggtattcacaaaacgttcatagaggcgttgcttgcatttcctgggatggagttgagtttctgcgtcctacgctctttcgcagtggaatggtgccattcgtgaggacgtttctaggaccgtcgacctgtaaagtcgtgtttatcatgttcgtatatttgtctttcttgggccatcgtacaaatacatatttcgcataattccaaaatgtacaaaagcttctcgacttaccctgttatggattcccttccttcgagaccaggtggaggatctttttgacaagctcctgagtcccataaggtttatggatgatatcatccattccagcactgagcatttccttctgttgttcgtctctgacattcgctgtgactcccagaatgggtacatgtcctccactttccttttcaatgtcacggattgctttggtggcgcgtttgccatccatcaccggcatctgctggtccatgagaatgcagtcaaatgagtgttttttattcgcatccacagcctcttccccgttgctcgcttcaactatgttaaagcccagtgtattcaacctgcgcgagataattcgtctgttgataatgttatcctcagctaagagaatacgctggccgtcgccggttagtttcttgtgatcataacgcgatggaggcttttgacccgttctttcgatctgctcgttctctacctcgtgggctatactttgagtccaaagtgtgtctgcgtcctttgggccacctggctgtgcctcagagatgctatcttcaggggggtttgccgacatctggggttcttctgtcgtttcatccacaccgcgcattttatttcccattgtctggatatcaacacagagcttatcgattgcggaaatctcgacactatcatcttcttcgccagcttcgttggttgttctgcgtactttgaaaaagaacccgaaggtacttccgtgggatttcttggagctcacaccaatctcacccccgtgtaggtgacagagcttcctacacacattcagcccaagaccagagccaccgtagatgctctcggttttgggggtagcttggttgaaacgttcgaagaggcgtttctgagcttgctcagtgacgccaatacccgaatccttgacggcgaccatgatatatgcaacttcgccacttccccattcggaattgttagtcgcgtcttggcggagctctgattcacctgaatcgaagaagacaatatttggtgggtaggaagttggacgttcgatagaagcagccaccgaaactcggatcgatcgctgacccttcgattgcgcggtgaatttgatagcattcgagagtatgttgatgagaacttggcccattcgatctaggtctgccatgacccaatcaatgccgcatttggcataggtaacatcggtcttgtattcgaagtgtattctgtgttttcggagttcgggtcggaatatcgccatcggaatagtgaggtgtcgctgtggctggacctttcgtggcgacagcggcagcatcgacgcgtcaagttttgaaaatgtgagaacgtcattgacgattttcttttgatgcctgatgcagagactaattgtctctgttgcctcagtgatgtctatgactgagatatcacccgggttcttgttatagattgcctcttgaatatcctccgtgcaatgtactatcgcagaaagaggattgcgaatttcgtggctgatcatatcgatgaatcgctcttgttgcttcttgcgttcctgtgcctcttcggcagcgtgcttttgtaggagctctgcccttttctccggggtgatgtctgcgactgtacagatgaacacgccatcgtcgcctagcccaaagcattgtacacccttatcgtccagccgatccaaagtcatgacacaccaaaccgagtccgggtcgcgcgtgtggtattccagacgcagcggtcgtttggaggttgcaacctcccgataccctgtggacacccggtcgtagtcgtcaggatggacggagcgtaaccaacactcagagaagttgacgctggggtgtggaatgagttcacggaaccgtcgattcacggagatcagttcgtatcggtgggtgaggatggcgacgccgttcggtagaatgtcggccagctgttgcgctgagacattctgattgaaagagaaagtcatctatttcttcgcgccgaatcgcgcttcttccaatcccaatggaagatatgtcagaggctgatagaaaatgctcgatgactgctcaattatgtggtacctgcaaaagattcgggtaggcgcatggcgggtgaggctgaactgcgatttcgtcgatcttccgtctgtagattggttgtttctgtaagccagcaagccaacatatactggcttatatgagatcccttcaaatacggaagggtatgacgatttatagtgtcgtacgtcattgtccctcttcggtctacttctaatgtgggggaaagtatttcaaacgttgtgattggcagaagtgaaagtgattccactgaagtgacaccccctggatgcttggcacgtgccctgcatgctgacgtcatttaaacttcaatagttaactaaccgagccctagaaagtagttatctggctttcataagctctgcttttttcttttttatgtgggattaatgcataataatggcatgtgattttctgctcatgattttggaatatgaattatgcacagtccctattcaggttgactgcgagacatctcataattctaggaacgcgagggtacgaagaagattgaagggttgttacaaagccgggtctttgtcgtgatgcaaaaccattgaatagaatataattccagcctagtgtccaaaataaggtatgaaaaaaaaggcgaaatgtgggtgttttgagagcgccccgaggtgtaagagttatatgtcaaatgcagaaccgcgaatactataacattctattcttgcaccatgaaggctctccaacttagaatctcgtaaagcaggctatgtggggaaggaaccatgtgttgaatcgagctgttgactagggaacaaaggcattcatccacatcgggcagtaaagctaccgcgacatacatacatagataatcatgcccaatcatcaatggtcatgctgatcatgttggtcagagcttttgcttgaccagcgatcagcttggcaaagcaggagaggatgtccctattgctcacgatcggcttggcaaaagtgatccgagtgttggaggggtagttacggagtacttcgcactccgttggtaggttggaggggtggctcctttacataccatatatcaattattggccagtttgacgaattcagcaaatagaaaactttatccacagccacagtatagaaggagtgaggactgcgctcttttattagagagcgtactccgtatgcataacggagtacgaaatgcagaaactgcaaaaagcacaaatgggaagattttgaaattttcgacagtggagaatggttccccactcggagtcagaggtctagaagaccctgtgggtgatgaacgtgctgtcgcggaggaaaaattagcgtggccaatctcaatttgactacggagtagatacccgcaatggtagaaatgtaacatatttcctacaaataatacactaagtaatagctggatttatctcttttagccaggctcatatatttttagataatgccggccttggaagtagccctgaaaatatcaaagttcgctaacgagccctatcgggatcccgtgggccttagcgctcggcccgataacgtttaagtttctttttttttaagattaaaggtttcaagctgatagccactttcaacacgccattgatgcgttggctctacagaccgtgagggaaatggaatggtcacacggcatatgcattgcgttatcaaagccacattttaatcataatagtcgtacactatctcgcatgtgcgagtgatagggccagttattcttcctctccacacctcgtgggtcttcctatcttaaagaggtaacccgagagaacacgctccattctaagatcttacttgaaaaggtaatccgaagggcctcactccactttttaaactggatcgattgaagattttgatttttagtttgatagtaaatcctatattagtatgaaagtaggtgccagtactaccctcgctattcgtttccatcttcattccatcttcgcaatcacaatgggcattgttgactatctcacccaaccgcgtgtccatcaggtacatggtggtgatgaaacacccaccatggaagtcccaaaagtaatcgagcccaatataatctctagtccggacttttcaggcgctgttacacctgcgcacattctcccttccccagctggtagcaaggatcctcttatttttgagaagatcccgcatcagtttggccgtctgggttcttggagagggtgtttgattttgtttgttacctccggctctcagtttctcgacaatgtcttcatgacaagcgccaacattgccctgtcggcaattcagcaggatttcggcgtgtctagtactgatttgcaatggatgatctctgcatacaccttgtcgtttggtggcttccttttgttggccggtgctttgtctgatcggtatgacttcctcttattgtctctaaacttgacatcatgctaacctgcacagttatggacgaaagaagatactctgtctgggtcttgcctggctttctgtgtggaccctagctattggatttgggcagtcgtttattcaacttacggtgttccgtggcatccaaggaattggagctgcgatgactgtgccatccgccattgggatcatcagctcctactttagtggggttgatcgcacccgagcactatcaatctatggagcctcgggaaccctggggttctgtaccggtcttatatttggcggtttcttgacctcttcgttgggctggagatatatcttctatctgattgtcatcatcactgggtccttgggaatcatgggctttatcgtcctcccaagcgatgttgcttccgaaaagaagcaagaaagaatggactacattggtgcagtgatatctacagctggcctgatcctgctccagttcgtcttgtccagtggtggaacctacggttgggaccagccgttcattattgtgctgctgatcttggcggttggtcttctcgttggcttcgcaatccttgagaaatacgtcagtaacccaatcatgccgctttctttgtggaagattcgcaatttcgccggtctctgggttattggtttcagtaagttgcctgtttttcggattcgtgcttcggacaaggctaattataaatagctggctatggcacctaccaaaacgttattttctatatcgtccttatggcacagaaagtggacaaactttctgctggtgacaccgcccttcgcttcttgcccatgggagccattggcttcattgcttctcttggaacaggaaaactccttgaatacatgaatggaaaacacctcctcattgtcggattggttctggctgtggtcgcccccgtctcgagtgctttgacttccaaccctgaagcaggcttgtatgtatcgctatttctttcttggataaaactatactaactctcacagttggctcaatgttcttcccacatcccttatcagtatctcatccgtatcttttgtcttcgtcacgacgagcactgtggtactcacaagtgtaccggttgaagtcaagagtcttgctggtggaatggtgagtttttgttccctgcattccaaccgtttacactaacatcttaactagcttaatactgcattccaaattggatctggtgttgcgttggctatctcggcagctgttaccgatgccgtcgacatccagcaaggacacagtctcgcagagcagtatgctaccggcctatggtgctctgtcggtctagccgggcttggactgatagttggtgttcttgctgttcgacacaaaggcattggaccgaaagatagattgggcgcaggcccagttgctatgtaactccgtgtgatgactttttctcggcttttcttatatagatgataggtagactttttctttaatcatgatggatatagcgtttagttagtatgacgagggaaatgggataaatctataatagttggcgtttgttcacaatatcaaaagttttcacacttaggtagttctcagtaccgaggagcgaaccaaatacgagggaatagcaaatgtcacggctcgtacccctctgagctttcagacgtaccttcctaatcgggtaactaccgctttgatattaaggttgcctcacacctacaccgccttccaattttatgtaccatttttgtatgtcaaactccccatacaacagtggcaagacagtaggaacctgcaatttgtatgtaaattactgacagaattaagtcacttttttcatattaaccactttatcgtcaagtgcttcatcgttaaggggctaaatcctatacaaagtgggtagaatatacgcttttccgatcaaaatgcaatttcttttcctatgtaaaccagaagtgggcagtactttttgattgtatcgaattaggaagacggtaaacaaaatttagccagggtcgtatcaatcccttcctcaaccgttgtgccagatgtgccctcatcttttgtccgatggaacggattcgtcaacaacacttcggaggcgcttaagtagtcttggcctgcaagtaatataggtaacaaattaacacaagtcaattgtaaatagccttcgaaccttggaagctacaatttaaggccttataataaggcaacgaacgcctcgaactcacatagtcacgtgtataccaggtcggccgcatttggaccaggtcgcgatgcattcatagcaagctgttctcggccggcattcgaggaatgtaagagaaaaaaaattttaccgcaatgtaattttgggttgccttggactttagtcctcccaaggtggtgaacgacttgattagcatcaatcctcattgttgttagcgctgctcaccatgatcgccaggagaaaggtccttcaaatggccgcagtggcggccattacaacttatatcctctgcacggtatttgtccgaagctttggagatagagaatggcccacctcgctttccaaactctctcagaactccatgggcgataatgttttcgaacacatacaaaacagcactcttggagttagttcttgcctaccgtctgacggaattcattgctgacttgaatattaatttccagtttgagcatatctacgcgatcagtatgaaagagcggaccgacaagcgcgatttcctcacactagcagcctcgatatcggggttcaaggtggaatggctcgagggagtgcgacccgatgatctacatcctaaggccatgcctgacgtatgctctccagttcaataaaccccagacaatattctcattctttctcagggactcgacacctcacccgtgaagctcaccgccgtggcatgttggcgtgcgcacatgaatgcattggtcaagtacagtcacaacttattctcatttttcagaggctatgctgacgattggacatttaaaaaatagtgtgataagcaatgactactcaaccgctttgattttggaggatgacgcagactgggacgtgagtctcaagtcccagctcggtgaatttgcgcgcgggctgcacgccttaaaagggaccaatcaggtatccaaagaagctccttacggaacagattgggatctcctttggatcggcggatgtgcctcgggcccgaacgccaacgaaacaagcttctacgctatacccatggaccccacagttccgagggtccaccaccgagccacctggggcggacccaccgaaaactggaagcaacaatatccagaattggccgaggactcgacgcgatttatctatcgggctgaaatgggctgctgcatgtttggatatgcagttacaaccaagggcgctaggaacattctttccgctctttccattgatcatttggataagccggtagatgatgccctgagtgaattgtgcgcgggtgctaatgggcgccgcaagattgaatgctgggctccgttccccaatttgattggtacgtatagaaaggctggatcggctgcccgggattcagatatcgagagcaacaacgcggctgaattccacgaagagctggcctggaatatggtatacagcaccaggcgtaatatccaccaattagttgctagcgaggaaattgtttactcacaatggaaggatgaagatgtgccatggtcgagtaaagagattaagcataaggagtttgtttatcctggtggatatcttgtcaattaatcttagctcaaatttccgaatgctagttacaattctaccgcaaacattttcgcacaacccacacccaaatatacatctccgtccggagaatttcgcggagggactgtatatatacctcggcattatacctttgttctttcctagggttaaaccttgttaaagcttgatagtgagagtgttggatcaaatttggtttgttagatcttggctttgagttatttaaaacccccttgcttcgtaaaggagttgcggcaaaaattgtatagtttcgattttcataaacgaatgagaggccacggtactgtatagtaattgtagccaattgtgtagtatcattccatacggaattcctcagcccttggcatttgggattaagtttcgggcttttatgctctatctctttctcataggcagagcttaggaaattggcttagggtcggcccgagtgggtttccatcggaatattattgtgagggttaattatcttattgatatcttatttatgtgaataccccaagtggacttgcaatatatgttctccatgagtgatactcaacagctaattgtagcttcaagtgcaacttgcgaatcaatgaccatggactctgtacggtatagctcatcaaaaaatattcagcgtgttgagttggagatgcctagacactcaactcatgggggagacttccccttgcgtcggctcttaggtaccatttacgccagactttggggtgtcttcagcaatcctactatggctttcacctctcctattactctccctttctgtgcattcttgagccctgtcacaagggccttccccgttatgtcttcctctcctcttccaaatatcgtcggcctggccactagaagcccttggctctagagccagccggaagaatgagtccaatagccttgcatgttctcttctagatcatgtggcttaaatgtcctaattgggctcagtggcaatgagaagataatgcaccaaagaatggaatgcctagagcgtgatactaaggagccaaaataagcgggcctcgactgtcctcgttttccttaaatctcgaggatttcaccgagttgacagcggctgatatatccatctgacttgtacagaaatcttcgacgatccgttgatcacgatcctaatcccgccgatccattataactatacagtcctacacatgccacgcttccttggcctttggggcaatagcctcaatatagctgccattttgggggtgctcatgccggggatcctcacagtaggctacaatgcatcactactcgggggtgtgttgacactgaagaacttcgaagaacagttccccgaaatcaacattgccgctgctgttgataaaccacatgcgtcaacaatccaaggcattgttgtagcctcttacacaataggaggcttcttcgggactctctcctgtatatggctaggtgacagatttggccgccgacgcacgataatggcaggatcagtcgtccaagtcgttggagctgttttgatggcttgttcaggctctctcattcaactcatcacgtctcggatcatcctcggtgtaggcactggtgctctactagccacaatccctctttggcaatcggagatctcgcctgccaacaagcgtggtgctcacgtcggcatgaaggggatattcagcggttttgggtgtgccctggccctttttctcgactttggaatgtcattcactcaaggcagtgttgcctggagatttcctttcgcttttgtggtgctactttccatcgctgttctagtgttcatctacctgttacctgaatctcctcggtggcttatccgacaaggccgactatccgaagctagtgaagtcctggcagctctcgaagacacatgtgtcgacgatcaagccgtggaagcaaaaatcaaagaagtccaaatatcactggacttgtttgaggaaaagtcactggggcaaatattccacatgggccctcaaagaacattccaccgagctatgattgctgctttggcaatgttgttcttgcaactcaccggctctacggtcatcaccttttacagtacgtatcccgaattatctatcgccatttatacaatatattgacccattctgcacattttcagcaaccgcaatcttcgaaaacaatctttccctcaataactcaacatccacggtcctggcagcggtctaccagctagttggccccatgggcggagccttctgcgttttcaaaattgacagactcggccgccgtgtgttgcttttaggcagtgcaatcggaaatgttgtctgtctggctttagtagctggcctcggaacccaagccgataaccctctcgccatgcgcggtgctgttttcttcattttcctgtttcatttcagctatatcatcggatttggcgcaataccatatctctacgccgcggagattgcgcctttgcatctacgcacaactatcaacagttttagcatcagcatatcctgggcggttagcatcttactcactgtcgtcactcccattgcattcaacagtatgggacagacatactttgtcattttcgcgggctgcaatgcaatgatgatacctgttatctattacctgtttcctgagaccgccgggcgcagtctggaggaaatggataggatcttcgctctttcgcgaggtcctttggatgctgtcaaggttgcccggcttcttcaacagggacaatcatttgacttgtcgcttgaaaaggaacttgactcaagcttcaagtgcccggagcttcagcttcgcgaggtatattcggcttgatatttacattcttatgactaagtccaacatttctattcgcgggaaataatagtctacacatggaaagcctcaaggaagcttcaaggtcctatgattcctccgcccagatgccattattttacctggactgataccagacgggagaggtgttaagtcaaagaagataacaaatatacgggtatgtacatactgattaccgagtacgccagtagatgtgtagacgaacatgcatgaagaccaaaacgtaacaacctggaaaactttgaataacaacaaatcaaatctcgggtcagaaatcacaagcaatagatgacagatacaggtaagaatttccatcatgttttgcccctttttttgggttcctttttggcttctttctttgctttgatctctggcttggtcttttctgcagctttgatattttcagcttgcatcttttcttcagcttggatctttccttcagccttaatcttctcagcttggatctcttcttcagcttgggccttttcttcagccttgatcttttcggcttggatcttttcttcaatttggatctcgtctttaatctctctttcggctcgcaaggtgattgccaatagaatcgcccctatctccttcatatcggatttcttcgttatatcccatggaccgtactggttcatgatcaagaacgacgaagtgtcatccggatatgcagctttcttatcgcttagatattcgagatactcttcctcatacttcgcaaccgtcacccatagctcatgcctgtcttgcgctatgtgtaagcgcctattaatatgttagcatattcgtagttgacccaagaaaggataaatacatacaggttgttggtacgctgggccaagtcgtcatcgcttttgatccaagcgaccatttgggcgctctcctgcatccgaataggtaccatatttagctttcttgtgacgggtttcacctcaatgatcgctctggtcttcccgccagggctatcgagatagccatccgtccttgcttcaaactgtgcgttttcaaaggtagcgataaatggctttctgtgcaaggtccaattcgagtagaaatcaaagtgcatggtaagagcattgagaaatacgatgagcgccgtattgacaatttgttcatccctcgtggggggatataaaattctgtccatttcccgtgagattgtgtttggcgggctggggtcggaactagggcttgagccagggctctcatcatcttccggcttaaagatccgactatgaaatgggggcgaggtcttattatcgaagtcataagatatgtctccagatggcttgcgcgattctcttgatggagtctgaggatcctccaaagtcattcctttcattcctctaactagcggaggatttgtttttgcacgggttcgggacgcgataggcgtgtcaaatgtttcagggtcggcttggggtttggtcttttcaacctcctgatggtagtatttgacaatggcaaagtttccctccggtcttgctcttgagggctctcctgagcgctctgttatgtgcggttctgggatcccaagaccatcacagaatgtggaccacgactgataagagcgaagctttttctcggcctctcttatccaatatttgatgtccggtacattggttatgtttcttttgtgcgtctcccatatcactcggaggagtaagaattggtcaaagcccattttggaagcagaagcaagctctttgtcgtgaagttttgctttcttaaggtcacgagaggttaccttgtcgcaccactcctgaaaggttttgggtatttcatccctctcggaagcaagcattgtgttattgaagagaattcaaacagataggcaatattttctagaatgaatgttgtcactgcgtaggaatgatttacaaaatggggataacaatgctctttttatgctgggggggctccttcaattgagaatcacatgctttagtaaggctaattattggtgataatttgatttctaattattaggtatggtagatttttctttcctttgtctttttgtggcgaagcatgcatgtagggcgagtaatggttggatgaggagcaattagttgtgatagtggctgttttggtcatccgagcgatgcatggtatctttagtatacgaagtcgacagttggccattggttaagagagggtctttgttcccaatgaggcaggagctgtagacactaagattagaatagaaggctgctgctgcttatgccgtgtcgttcggtagtctgttcggtgatcttcttgggtatctcctttttaggtacacggaaaaggcgggaaagggtttaaattatagaaacgacctttctgtgtagttataaaagttagattagaatgaacttgaccctttccatgtccgagacaaagaaagtgaagttggtacgttggtacgttggccctggtcttggcgctttggtcgctcggcaactcgcctcatcacatttccccccatcagtgaactctccgccttttcttctctcacctcccactacaacatattgattgtagttactcctatccaagctatacatcatcttcaaatccctcatacgaaacatgacttccgtggaaacacgtgatcatcagctcgaccgctggcttctgatgaaaatcgagcatgcaatcgagaaccttgaggagcataagctcaacaacacagaacttaagaaatggaacattcgcttctccagcatgactcttgatcagaactcagacctcaagccccgcttcttcgcaccgaaacctaacctcccgctaccaaacgatgagatactcgatgaggccgctgaacctgatagtggtgatgatgactattatgcggctgcatacggcatgaatactttcttagattcttatgccttcagccaagtaggcctctggaatgacgggccgtggcgttcgatggagtaagtctaccgctatttggaaattagagttatgtcgctctgtctatttatgatatctaacgctagtcaatagctgtggtcgatacagtacttataagagcctttggttctatggtactccatcacttggcccgtctcccgcatttggcgctttaacaatgatagatagtcctgggaaagaatatccacattttaaagcagttatatataccgacatggaggcggatgacaaaacttgtttccgttcagaggtcttgatcagccttcgcctaatgttggcccaattgagaaaggtgcgcctgatgcaccataagatcgcaccggtaattatcgattcttccctttctcctattcctttattctatctttcggcgttactaactaattattctataggttttgcttatctcgttgacggggaagtatgtacgggtattagagtcctattttgatggcgaattgcttcaaattcgctctacctgtctgtacaaattctccgaccgtgactcgatatcgacattgtacatgatgctcgccgggtatatgctcggccctcccatcggagatacctcttctttcccttgagttagtttggatcgggcaaggtgtcacggcttggagtttggttgtatgttattggatattgaaattggtgaagtttgtctttggcgctactgccgcatttcatgcagtgatgtgcttggtacttttcataaaacaggttgataagttgaaactctatggcagatctcatttttaagatgttgcaccgagtaaacccttacattacccacgatcctctaatatgtttgaattggatctcatggtcagcgcatataaagttcggcttcccacatacttctgtctttccgcttggcgtatcatgacggcaggatgagtggagtagtggagtagtggaggttatcagtgtgatagtaatccaaaagtgggggttcgatgatttatgatattcgagagctcaaggatgatatattctgtactgtcaatggctgaaatttattaatttccaagtttccaacagactctcaattacatcagagtctcgacatagcgatatacaaaaatgaaggatgggtatttgctatagcgattgaagccagctatgtatatatccacataacagcgtacataatagagcgtgccgttcaataggcatcatcgatatgcacatgggataattcgtagttatataattgactactttgtaagattccgacaaagatgcatgtgcccgcatctacagggaaacctaagaccaacgtcttctccaagagtgggatacacactatcttcattcttctttgctccatctcgcctactgaaactccattttatcaatcgatcatgcctttgcccgagtcctgtattgggaaacgaaggcgaaatagaaacgcctcaggcaaaccaaaaccaagcaaagcgcgatcctgcgaggcttgtcggcgcttgaaaacgcgatgcgaaaccggcaactcggaccgatgtcatcgttgtgatgttctcaggtagggaaccaggtttgataatgtgggttaccaagctcttacatctaactatcttcagggttaggtgctctttccaggccatttcccgcagtcacccggaactgatgctggaggcggaggtggattctgcgacaagcggcgacgactaccattcgcggtatgccctcctcccgtgctgggctttttaagacttggtcgatgtactgatgaacaataggctttgtgcggtggaaaacaccttgagtcaacttcaagcatcactatctgtccacagtgatgctgactgccggactagaccaggggtaaattccagttacctaaagtatatactggcaatacatttaattgaatactctaggctccatcaactattgaacgaactgcacgcgatgcacccatgaatcttatccaagagatccgacagaatatcacattacatgaacaaccatcgaccagcgatgatagcactgaagatattatcatcaacggtatagtttccgaggaacttgctatcgtgcttctgaaagggtgagcatgcgggacgttctcgtagaacatatcccaatgttaactttccagattctcgaaattatccaaccgctggttattcatgagtacagaccccgtccagctacgcaccaaatcgccgctcctgtttggtacctgtattttggcaggtctccatatcaccccctccttgtatgggtcatcaacacatcaagctttgtatcgccatattcacggactgctgggccaggcacatctttcttccactgcctcgctcgacacaatacaatctatgttgattttctccatgtgggacctgcgcccaactttgggccctgatcacggtacctcgtggcttctcagtggcacggcggctatgcgggtgatcatgactacttcgtttgggcagcttctaaagacaagcgacgccgatagaagcgaacgagccagagcacaagaaataatgcgcacgtggaacttgatttgcctctgtcagttacagtgcgttacaatgaccaagtctcgatccttccaatgtctatatcatctaacactaatcttagattttccgtgggctctggtcgtccaccgattatatccagccagtactttgacgaatgtaccaacgttctcgattttccgtcatacaatgcacgcgacgagcttgtattggctggagtcaggttataccgactcctttgggaaatcctaagctcaaacgtgatacaaaggggaagtgctgtttggcctgaaatcgacaacttgcgaatgacccaggagaatatttacagtgagcaagaaatatacaatcgccgcattgaataagcactaattcctattttatagagcttgattcctcgcaaccattacggtttgcatacgcctgcacgtacctgattctggcacgtcgcacactccaacatacgagcgaaactcaacctgaaggaatgaccaactccaggataacacaagaggaaccaacgctcccgttaattcggttcgcgattagccagtcgcttcaactcttgaatttatttgtctccatgtcggatttgaccacttatatccatcctgcttacgagaatgtgctttgttcctttgcaatggtgacactagctgagtttttggtccatttagaggacgtgggaagtataattgttctcatggaacaggccgtctctcatattcaatgtggaggcaaagccgagccggtgagccggtggtctctgaacatcatgaagcaacatgtcgcagataggattgagcaagaagattgtgtgacttcgacgggagagaatggcacagggatttatatgccgcagtcagttcaaaatgctactgagccctgggtttgcaacgaatggggcatcgagcaggagttcccatcacttgaagacatgttcttcggtaatgtgatttgaactgaggaataaataagggattgttaatttatcctcccgcgcctgagtcttcaggtgcacatccctgttttacctgacgcctagttactttcatctactgcgctctataccgccttcgaattttatacaccgctttcgtgacaatagacctacaatttgtacggcgtatgtaaattaacaaagttaagtcacttcaactgcactaactgcttcatccatcaaggagctgagtcctatagtaatcgggtagaatatacgattttttccgatcaaaatgcacgtttcttcactatgtaaaccagaagttggcagaatatatggtcttacctaatatggaaggcggtactgaaaactcaggcggtcaaattagcaatccccaataaatattggctcccccattgtgaacatcaaccatttactcatatcagttccatatatacattcaaaatgcggaaatcaactgcgctctctcaatctgagacctgcctggcactccttgggctttttcgagaatccttcgtgtgattccatgattggctggtacaacgcgaactcatatcgatgaaacaaagttccaataattagctgcagctccatgatggcgacgttctgtccgacacatgcccgggggccatatgagaatgggttgaatgcagttttctgtcgggcagtcaggttcaaccagcggtcaggcttgaattcctcgacatcgtctccccaaatatccttcatatgatggatagtataggagggcaccgaaagtactgttccaggagggaagtggaacccatcaaaatccacacccgggctatgatcggcgaccaaacgtggcaggccaatagccgaggtagaatgaagtcgcatcgcttcatcaatgcatcttcgcaggaacgggagatccttgatctgagaataagatgcgatctttgcttcggggtctattgcgtggtccagctcttcttgtaatcggggaactatcgtgcccggtgcactgcgttctccatgcaggatccagtaaaagatcccgcacgccgtgttggatattgtgtcagagccagcgataagctgcgtcagagcctctgctatcagctcatcccgctccattggcattccattcgcatcttttgcttgtagcaagcgcgacagaatatcgttgcgcgagtcgaccattcccttctccgcggcatccagtcgtgatgcgacagcggcgacagcaatccccgtcaggttctccacggccgctacgcccttggtgaaaaatgggtctgggaggtaccgagcccatgggcgcagtgctggaagaaggcccaatgtcgaagatatctcgcctcgtctattcaacacgtcgactgccggggtgtatgaaatgggtcctccggtcacgagctgcgtctcggtctcatctttgcccttgtttaccattccaaatggtgaaccgaatgccagatctccgattatgtcgaaagcaaggtagctgaaccagggcattgcgttgtatcgagcaaattccttcccgttgcgttgtggctgggaagccgcgatccggtccagctgggttgtccagcgctgtaggttttccgccatgaatggctcaaactcagcgactgacctgggagagaaagcatgggatataatcttccgcttgcgtgtgtgttcggcgcggtcgcgaacattgaacatgcccggggttcgcgccacgaatgcttcataatagtgactaaaggtgtttcgttaacactagtaattttcaatatagggaagaaatgtgagttactccttgaggaagccatttccgtgcccgtaaacaatattcaatgcccgttcgtcggcgatagacacatggttgaaaccaatacggacgacattgccgtgttttcgatgcgccgcgtcgactgctgcatatttccggccatgtttggcacttaatccgacccatatgttgctaaatttagcaacaaaaggaccagggacttgacttaagtgtccatatgaaactaaataggggtatatgtagtagaccgcgaaccacacggggatagccacagccatagcccatggcgagagcaaaagggatagaagagccatttgataaacagagatgaatgaattgatagactagagattatgccattctcttcctcttttttaaatggaatcagttgcactcgacatttcacatgttcgctatctgtccgacggagtacaaccaacaccgtcggagacgagagaaccgatatgcagaatcgatgtacaaggaccaaagaacctgcagatagataattgaccccgcaacattggaaaagtaaagatagagaattggaatgcagtttattggttaattttggacagctctgaggttgttcctcgaatgtccgcggtgataagcggccataacgcggcattttcatttcccgaaacctccgctctcacgggcttttccctgtcaaacgcttccaaacatattgaaattccccatggagtctcagtcccgttggcgtcgaaggccagctcggtcttgcattgagtgtctccgtcgcaaaatccgctgtggccgaatgacccctgtacgcgttgtgtctccgtccacgcacaatgtacctacaagctttatggcgatcaacacaagtcccccttgtagtctctagagagcacctcaagacaaccaacactgggtacttccgcaccttcaccgtgacatgctcaacccttcagagatgatcccccgtcatctagtagccagccattagagcctcgcaccactggggtagggacaccaacaccaacaggaacaccacattatagttcggcttttcctggtcaggttgatgaacacccaaggcaagcacaagccacaaactcagctattgcagatcttttgcaacgggtccagggcctggaacagtcggcacaaaagcctgtgcatggcttgtgttgctgctgtcggttctggaatcaccgtcgaatcccctgcttggccttgaactcccgtctcgcaagatctcagatattttggtgaccttgtatttgaaatccttcgagtcaacacaccgcatacttcatataccttccttttgggttgactaccagagatattggaatgatccgcagaatgcctcaaatgagctacgccttacagttcttctcattattgacatagggtcaagcctgcacaaggaggaaaatacagatatcggattccgaaaaatggttcatcgatgggtacatgctgcgcaagcatggctttctgggacactagaaaaagaccgactgagtgtttccgcgctgcaaattgactgtcacaatcgtcgagcgttttccttcccttcgcgcttcggggctccagattgatcttcgaagccatggaattgaagtcatgaagcgcatgggtctcgaagatgccttcaaggcacattcaattccagagcggggcatggaagtggtcaacaaagcgggcaaacggcaggctttctttccagcaaacgattctataaatcccagtctaggctttagtaccaagtacgaaatcatgagaggcgatctgtgtcgaatcatctatgatctgagcaaaagccgggccaagtatatcttcggcacgtcaattgagagctacgaggataacgacaaggaaaagaccatcaacgtgcgatttgcaaatgccaccgaggacacattcgacctcgtgattggcgccgatggccaagggtcacgcacacgaaagatgatgctcggaagggaagcccccgatgcattccgtcccctcaacggtcgctacatcggatatttcacctttcctcaaccaatcaaagagggggaagggtatgtcgctaccatgtactcggcaccgggcggacgaggtatcatgcttcgaagacacaatgcgcaagagattcaagcatacctcggcggccaaacgaattcagagcagctcaaggaacatttgcggggtgatgttgcggagcaaaaggaggcgttgaaggagatgattcaaggggcggggtggagagcggacgagatcttgggatatcttaaagactctaaaaacttctactgtgagcgtcttggtatggtcaagatgcctcattggtctcgcggtcgtgtcgcgctcgtcggggacgctgcttattgtccatcagtcatgacaggcatgggtaccacttctgggattgttggggcctatgtcttggctggggagattggtcggcactgtggtgaacctgctgagaagggtaatggttctcttatggctgcgattcaggcatatgaacagacattccgcccttttgtcaaccaggtgcaggcaggtgttgccgaggatgaggggctttgggataagatttcaggcaccgcttttggcattgcacttggaaactatcttatgggagcttcttcccttttgagattggatgttctcagcaaggtctctacggatcctgtcaaaaactggaaacttccgacatacaaagagttgctccgagattagacaacaccaactgtgcaattgtgcaaccttcgaactcttctcttatatctacctgtatttttcctctcaatggcatggttatttgttttatttgcagtacatcagaccatggcttttctttacatataagcgaatctatagcctccagattaattatcagtggttcaaattcagcctgctagagatcttgcaataactctccaatttaatcaactactcaagctattgattggcacacggtgaggagtccatgttttgtttttatttactatgtcggcctcaagcagccagtaacaatacgtttttcctatctgggctagcttggtctctgaaccctggaacctcggaacttaaagcagattacgtaattacgcggggcttgcccgccctacagggcttcatttgtacgagcgatgtgatgggctcctcaattacttgtgctccagttgtcgggatttggcatagattattgccaacacaccatcttcctgcacataaccataacagatcaagcacttgctcactcactatgccgagccagaatacaagctggagacaggaagaacactaaacaaacagatatcatatttgaacaaggtacagagaacccaatctcacctgaagaaaaaaatctcaccccataagcgacctgcagagcaggagatgttcttcacgagctaaactcccgaatcaattacgtacaatctcgggatttggaggtcgcaatttgcattagcagtcttgggagacagggtgcttatcctgtataagcctagcggatgtcattgtctcattgttcctgcggcttggcccgacacggcctacttagttggcgtacttttgcctgcagaatatattagaaccgtgtctagcgacaggaatcttgcaatcagtagtctctccccacgtctttgtcaatattattgctaacatggtttcgacttggctccactgcactccacatctcgacagacgatgtacccttcataagggtaggctgtcatgttgtcgagagggttgctccgctctggaggtccgaccgttcggttgattttaactcttttgatcttatctgatccgcctttcttcgtcttggtttttctttttctcgtggatgtttgtatttattaggctgcaatacacacacctacgccagtctgatatatacctcgccaaatcatggataaattacccaacgcaatggccaccgaggccctcccgaaagaccaggacctggccgaccctgagctacaaggaatcttagaagggaccgcccgattccgtcgtctaggctggaaacgactcactgtcatttcgatagtcgaggccatcgccctgggaagcctaggattaccgtctgccttcgccgctctcggaatggtcgcaggcgtgatcctaaccatcggactcggcttcgttgccatctacgcaggctacagcatcggcgaagtcaaactacggtatccacaagtcggtcattacgcagacgtcggccaccttctgctggggaacgtgggatcaaagatcttcgtaggcagcttcgttgctcttctcatcttcgtgattgggtcgcactgcctgaccggcgccatcgcattccagaccatcacgcaaagcagctcgtgctcgattatcttcagcgtggcatctgctgcaatcctgatgctgctcgctattccgccgtcgtttgccgagattgcgattctggggtatattgactttgcgtcgattctcgtggctattggcgttacgatgattgcgactgggatccagagctcgaatggatccggtggctttgctgctgcggatgtttctgcgtggtctgcttggccgaagccgggtcttactttctctgcggctatcgtggccactaataatattgtttttgcgtattcttttgctggctgtctgccgtcgttcatggaggatatgcatacccctgaggattatgtcaagacgctgtggtggctaggcggtattcagattgttatctataccctgactgggtctatcatctatgcttttgtcgggcaggaggtgcaatcgcctgcgttgctgtcggcgggccctgttgtctcgagggttgtcttcggtatagcgcttccggtcatcttcatttcggggtcgatcaatacgacagttgtatgtcgatatatccatggaaaggtgtaccgggactcggctgttcgcttcgtcaacacgtcgaaggggtggagtacatggcttggtcttgtgttctgtgttaccatcctggcctggattattgctgaggctatccccatcttttctgaattgctctctattatttctgccctgtttgtgtctggtctgtcgttctatatcccaccaatcatgtggtatatgctactgaaagagggtgcatggtatgagaagcacaatttgaagcctgcgattctgaatggtgtggtattcctcgtgggcatgattatttttggatgtggtacctattctagcgtcactgaactggtaagcccttttccttttaccatccgagcaagattactgactatgttttagattgataaattccggtcggggtcagtaagtaagccatttacctgctcttgaaatgtcgcaataacgcggtgatgtcccggcctgccgaaatctgtttatataaaagttccatgcaaatatatgactatcgttccatccatatacctacagcgatatctttctacttcatctaagtcttgtttgtgcgtagcgtcaaagaatagtagtttaaatatagctaaatacaacataaaaaacacaataaaaagtccatggtgtctaccgcgtttacttatacttacctcgttccctcattactcctttcaaccccatccatcggatctccaacccagtggttcccctcaaagaacgcctgtaaagcaccaccactatcacccaccagtccttcttcattaaacatctcagtatccaaaacgccaagcataggatcgccaacatcccccaggagttgttccccagcgggagcagatacaggtacaggtacagccgcagggacaggagcaggagcaagggcaagggtagggagagggacaggggcacgggtaggagcaggggtgtagttagtatcagagaactcagggcccgccgaatcaatgtcatcgtccgattcacgagcagagtcagtgccagtcgcggacgtcacggccgtcttgcgtgttctcgttatccttcttttgcgggttactggggcattcgtcgcagcctcattttctgctccggtttccgcttcggtatttgctcctgcgcctgcgcctgcgcctgcttccgcctccgcctccgccctcttccgtttcgtcttggcgtgtctttcggccgcgtatcgggctacctgttcagaacggcggttatgcgcaatcgcgttactacccattttctcggttggacgagccaatgctggctgtttaggggttagggcaccacctgtagaagaatagaaatattagcatgtgatctttcttccaatcaaaaaccaaaccaaactagaaggctaactaagccatacctttaataacaccagtccgaataataatcgtcatattaggcctaggcaacggcgagcgcctatcaccccgaaacggatccggagacgggttccgcagtctaggccaatactcgcgaatagtccgcacaatcgtagatgcgaaattcaacgcggccatccgcacctcgccaatctgtgggttagcaacgttcgcaggatcgatttggtctagggagagatggcttagccagattgtttccctgtctcgtagatagccttcccgcgtgaggttctgtttgaagagctcgaattggatgttcgcgatgttgatccagtctccgtctgggcaggtatcttgtggatttactttgtcggttaggaagtcgcttactcgcattgcgagtggcatgtcagggtggtctgcgcggattatctgcacgtcgccgttggggactatgtacggccggccgtagtcgaatttgttttgtcggtctgggtttctttgggcggaccttgctggctgttgcggttgctgctctgctggtggctgttctggttggggtgatgattgctgtgctagttgatgtgctagttctccttctagttgctcttctacctgctgttcagatacctcgatggaatgctgtacggacttggatactcccctctgcacgggctgtgctgcggtcttctctccccctgtctgttctgccagtggattctgccgtctgtcaaattccgtctgcaactcgtcttggatgcaattcaggtatttatacagcgctccgcatagaagagtgtggtccgttacgtgggctagagtagcggctggtaatctcggcagtcgcttgcgccactcaattagcattttatcgcgcgacgcacttgaccggaaaacgttgacgaggactcggccattgttcagagcgtcgagcgcgacgatgtcgtagacttcttgtgctagatcgtggaggagctgttggtcggtggggctgtatagtatgtcaagacgcttgaatacgtatttgtcgtcgaagttgtgtggccaacgactgagcggctgcggctgtggaggcattttgttagctttgaatgatgtattcgaatggtctggaatggagggtcatggaggattctgttcactatttaatactcgagaggctttgtgactgcattgtggccttggatctcgatattccaatatgcattgtatctgaaagagacaaaggaacaaagaagacgtgatagagactaaattaggtcaaagaatactctatcgaggtgaggtttcaaggtcaacactattattacgcaaataatgagatatctagtctcgatatttttagattgttagatctaactatgaggtattgtggcggccggggggggccttctccacccccccccnnnnnnnnnnnnnnnnnnnnnnnnnnnnnnnnnnnnnnnnnnnnnnnnnnnnnnnnnnnnnnnnnnnnnnnnnnnnnnnnnnnnnnnnnnnnnnnnnnnnnnnnnnnnnnnnnnnnnnnnttgggggcggctggtgggcccattcccaccccgccacgttcaggatggcgagatttgatcatttccaaactcgaatgattctagacccgagaatacagacagttacgattacagagagaggtttgaaagaaatgacgtggatatttgcattgataactccttataaaatatgaacacaaaattcataggtatgaccttccaggcgaccaatcgccagaatccatagaagaaacgaaatagcaattgctcacatacccttcctccgcgtattttcgtgattcatttttgaaattttcgtcaagcaagaaatcttacgagacgtaagccttgccagccaggttgagagtgctgccgctgagcaagtagttctcagcgcacatgaagtaagagtaacgagtgacagcagactgctcatccaaccaagggatcacctcgttgaggaaagcagcagtagcagagggatcggcagagccattgacatcagcgttgagagcaaactcggtgatccagagctcggacaggttgttgctggaagcagcactggcggccttggtgacaaaggacttgaaatcgtcggcagtgtcaccgtaccagtgaacggccaaaccggtgataccacagctggagcagctaccgatgaaagactcaaaccagtcaagacccaatccggcggtagtggaggaggtgacggcgggcgagatcagcttcgcctggccagaccacggggtgatgtaggtctggtagtagctagcagcatccgaggggctcatgttagcctgggaggtcatgtcgggctcgttgaatcccagaatgtaggtgctgccgctagacaaagcggtctggatggcggtcacccagccgccgaacatattctggccccagagcatggggacgtattcgacgcctgaggggagcgaaccagagagatcaccggcccagttgtaggcccacgagatggtgccagcatcggccagagccgacacggtgctgatgtcgttgtaggcggcaccgcgcttgctcgaggagcgcttggcatgcatgggggcggccatggccgaagtggcgacgaggccggcggtgaaaagcttggtgaaagagaccattttgaaagtcaaagtatataagtcacaaaggagtggactagatggtaaaaaggagggaaaaagagagaaacctgttctcgaccttgaaaggaaagtgaggcttagaccgtgcacggcacaggaccagaagaccagaaaacaaatgaaggaagggtaggtggtgaagagaggagggaaagaaggagggaggcggagggtttaaatcccccagggccccagcaatgtgtcaaaccagcctaaccgctggaagatgttccagttccacggtggagtatgggaaatggccattggatgttggccggaggcgtctttggccagaccgtgggatacacggcctcattggcgctggggaatatccgtggaccgttgacagccattggaaccgtgggaatggccttctcctcttacattccttcacacgtgcatcgaagtatactctcccacggcgctaacagagattaattctttcgcttcttcggtatcaaaaaggcacacatcggatgcaactccacagccaagatcgctagtccactccacaatagcctaggccccgatcgggtttgttacatcggattttgtcattgccaagaaagagttcacgtcctggactctgttcctgcgtccgctttgtctgaaatgacaattggcttgcccctggcatcccatcgaagtatacaacggagacaaccgcgacaagggggattgcacgcccgacaacaacaaattgccctaaatcggacggtggagacagcaacgtaccacggttggcattgcatcatccaatggtttgtcatggattccaccgcgcggttccctggttctccgtcaggggagttgtcctgataggtccacccccgatacatcatcgtccgggtccttgggtgacctatcagatcactgtgcctattgaacacaaccctaggaacattgcactacggggtacatttaatttaaatcacttcggattgtaaaagtgtgagattcaatccgattcagtcctgtggtgcttcagtaaatatcattcacacgttacggaggattcaacacatccaggcgtcaactgaaactgacgaattatgacacactgtccagccgccacatcaacagttacggagtaaaatggatcggatcggccagtcataggaatcatagtcacctccctttcaccggtgcgttccttacttctagactgggggcgttgttctagggccagaagaaagagggggcgtctgaaaccaacccctcctcccctcttcccccctgccgatcggttgccgaaaaacggccatgacaagccttgccggactacacgccggtgtttcttctggtccatcttgggattggcgcccacatccaatgttcctcccgttctccaggcatgtcctaattttgtagtcggttttgcttctacttgcttcgtactacctctcataatttgctatgtatgttctcccttgggatcatgactggggatgctcttattcccggctctcctataggctgtggggatatactcggtacacaagtacatatactccgtacctggcacagatttacatgccaagccgatttgaattttcattcatatcagggatttccctgtggtcctaactctaaatctctcaatcattctttgaatttcattgtactcgtactccgtactcccccgggctaatagttgccactatgtacatagcgagaatcacaatgatatcagactgcagtcacctccggctggacatacctccgcacccaagtacgcatgcctgtatctcatgtcaaagaccaagactgtggttctcctcatctgaaacagacccaatcccaccgatctctttgtggtcccgtcaacgtggaccgagactctaattttcagctcttcagggcactttctcggactatgaattccggactatgtcctccgcacggcgtatttttatcataataatttctccgaaaaaaagaaaagaaaagaaaatatgcccgtgaagttgttctggccgtgttggcaaagcaatgtggcttgtctcaatagactcgcttctagcccggttcccactttccctgccgacgctctgcccacgtcatcttactgcgcagagggcttgggcttgggcttgggcttgggcttgctggctttgtacgaagtacacatctacactctcggaaatgaacaaaggaggttcattaatcattacttaccaatctcgaatctcgctttggtctttgactcgagcccaaactgtcgtctcggcattctagctacttttgactagtgcccggactcaacaacgtggactatagaggaccatttttagattgtaacgcgtggtcttggtaggcactcatcgcactggccatatgtcggagtcgccggacagctcgatgacatgtttaggtagctatcgtcgctgatacgaagatgtctttaaagtatcgattattggtttcaggaagtgctgatcatgcatacctgtggttgatataacaagtctacctcgtgttctcatgggatttatcatttcactatcactatcttcggtttatcaaatatagaagcgacgcgatgcgagtctctatgttctcattatcaatggtgctggatatagcacatcatctgttgattttgggcaattatgcatactcgaatggcctctttatatcggcagtctcctcaaacacgaagctccatatgtattaggctttgttatggacctcattaactccagccagttgcctttatcatgtttggtacctgttacacgggtactcgaaagtgtataagcatttacggtggtgtatggaatttatgctaagacttctatgaaaattctgtgtagaccttcctgagattaagatcatcatcggaagacgaagtgctggagtaaatgtgatgagtatcatttataagtatcacatttcttctagcaacagctcacactcttcatcatgagagcaataaatttgaacatattctataattcctactttcttagagttactaaatgctgcagtctcagtggttattggtgacgaactatccacttgcacaacttacaagtgtatatcctcaatctagccacccctaactacctataactcaatataagcattcaacaagctaaaccatcatattgcacaagatctacagtccatttttacaaataaaatcccatccaacaactctcatctataccccatccaatcacaaatactgcccaaaacagcccaattaaagcaggcggtgaaccgcgatgatgtaaactatcccatcgcatcatcagaacagctccaaccttaatacctattccctcccacaccaatccaaaccggcccatacaacaatgctctcccgtacagctcctcgagctctgctcgcatccgtccgcccatccatccgcacaccagcacccaccaccacttcagccatcctcccccgggcctacgccatccgccccagctccgccgcacagttcacccgctcattccagtcgtcactggcaaaccgcaaaggcatccacccagaatccgcaaacccgccagctccaaacccgcagccgggcgttgccggcgctgcttcgcatatcactgagccgtcgccgttgacgccagaggagtactacgagtactcggagcattatttcaatgtgctgcagagcgagctggagaggctgcaggaggaggggtcggatgttgaggctgagtacagtgtatgtttctcccggtctttttctgtgtttattttgtttttcccggtctttttattttccttgatacaaacagaccttgtgttggcatgctatataaaatataaaaatggaaaaaactagctaactctcttcctccaggccggtgttttgaacatctccgttcccgcaatcggcacctacgtactcaataagcaaccacccaacaagcagatctggctcagctcgcccatctccgggccgaagcggtacgactggattgtcgagggcgattatatgcatgagaagcaggagtcgcggcctttcgtcaacgggcagtggatctatctgcgtgatgggtctaatctgaccgagttgttgaactccgagttgaccttgagtttgcccaaggatgtttacagtcaggtcattgagtgagagagttgtcttgctgggctatcgattacctagaaagaagagattcttgtcgttccagttttatttgggatgttgttacatattgtagtttagtgtctatgttatgatgtggttgcattgagatctttacgtgctgttcagttcttaatttgctagatggaggtgaataaatgagttggggacatagttgtgagtatcatttgagctacctgcactgggtgggtatatagtggttgtgtgtagcgggaatcaatgctgaggtgggaaaagtcatctcatcgccaattgaacgggtgtagcaaagtgctgttctttctctttgaatgaacccgacatgtacatagccaaatacagtctcaacccgatgaatgaagcggtgtcttgcctctccaattgattgtccaatgtagaactacaccagagacaaaatcaacggagcccgagtcaacattgaatgtgttgagcgaggtacgatgggtaccccagtgcggtcacagagaccgatatcccccgggatacaccgagtcacttggcaagattggaagatgcatagataacatccgcagcagaacatcgagcatgttcgcgcgatccagtgttcaaagcgaagtccggtggctcaaagccacccagacccggcgagacacatcatgccgtccagacgagcattcgcagccgggtagtggaacagcaaaatatcccaacccctcaaaccacttccgccaaaataattgcaagtggcaacgagccgactcagcagcatggaccgtctcttcgtctgagatagacccgatcatttcaagggtattcgcaaaatctccttcatctcgcactcaagcctgaacagccaccccgctcgtactctgcgtctcggctttaggaagatcagactgtgcataccccgcagggcaataattagccaaccgaacaaaataaagcgacatatatctagcttatataatagggaaacacaccaagtcgaagataacccggatcatcagactgcaactcggacacacggcgatctcttcgccgtcgcgcaagtcgtcgattgcgatctcgaagcggtcgccacatgggcagggatatgtgtagatctggatattcgggtcgaaggtcatgtcttcgatctcgatctcgtcgtagatgttcagtccgtcgtcggccattttggaggattatcgcgtatgtgcaaggagagatgtggcgaatgagtggatagatcttgtgccgttgactctttcgggcagaaaaactttggcgcggtcatgtgatgcgcggggttaaggcagggtatccccgggtttaagacttggcgggggctgatgaatgaactgtgaactttcgtcttaactcaattgtgtatatactcggggggttgtgaatcgggattggatgcactggctcctgccattttgggcatgccatctccaaatatgcagcttcgatacccaaacaaatacagccttagtccagtcggtaggctgcacaatcacaaaggtcattacaggtgccaacaaaagaaatgatttgagctgaaagagatggccatgggttaggcaaggagcatgcatacccacctccatccaatcgtccgcctgaggatttgtctgctctaccaaacagacccctgcgatggttcttctggcttgtcaaatactaaattcaaacatagatgatgttgcagcatgtgacagcaagaatgccgcgatggagggtagccgggaaaacagccaggttgacgatggattaggacctcggtgtgttctctatggctgctggcaattgggcttggggctgtaaggaagaagtgagttaaaaccagcactgcatcaagccgtatcttcattataccatgtaccacctagtgtacagttgtagctcatttctctaatcgtgcaatttccatctttacttcttcaatctccctcgctaaaaccccatagcgacgagcaatatccgggaaagtcccttcatccgcatcgatatcaaccggatcagacacctcgacatcgccataatctctcaactcttgaatcgtcatcttccgacggtgctgcaggcgctccttcgtctgcctgagatgctgcctataccgagcaagagcagcgagtgtttccggcgtatacagcgtagccgcaatctccagttttgtaaccctgtcgaaatcattaaacaaactccaccagaaagacaacagcaagacttgaaagctggaaaggcagaacttactctaatttcccctccacgccttgcgccagcacagccaaatgctctgccttggctttcgtcgcgcgcgccagagccccatgcttcgcccgctccagggtcacaaccgtgcgctccaaaacccgcgcccgcgcagcaacaacctccgcagctgtagcagccatattccgccgagcaaccggcagctcggacagctgtgtgtggcgcagcgcacgtacccgcgcctgcagctgtgacgagagcaatgggaccggcgccatcgacgtccggactcggcgatcgcgtgcccgggcacgtgcgatgtggttcgcgtgtgtggttggagcgtctgcgtcgggcgcggtggctggatctgtgtttacggctgatagagctcgtaggtcttgaacggcagatgagatgtttttggagagtggttggatgaaggctgggatgttggcgtagaaggcttcaatgtccggtgctaggagggtgagtacttcgtctggtttcttgagttcggtttctggctttggggtggtgggttcgattgcgctcgatggagtctctaggtagagggtgattatggccaggttatcgtggcactagatttggtatgtttgttagggatgtggtttcttcttggtgggggttgtactgacctccgccgggaggttggtgtctggggcgaaggccaattgccggagcatttgttccttgattcgctttttggcattttgagtctggcattgcttcagctcctaatgatagtgtcgtcagagctctgttcgtgcttaagtccgttaggtatgtgctgcatagcgcgtcgaccacttacttccaccacagctgtacgggctgggctcgcgctttgagcacgcgttgaggcatctgaattgaggagcgaggttgttagattctcatatagtcgtttaaattgaggattgtgctcaagaattgaggggtcacagggaggaagcatgttgatgttgcaaagaaactggccaagttcaccgccgaagaagacccgacgcgtcagcgccacatagacagtaaggaaagaaattcgcaatacaagatcgtacattcaactacatacctaatccatgttagatggtttaccattacaagtacatattcattttgcatttccgcgtttctttcataatcatacaagttgaagccaaagcttcggttcacctcttccaaccgcaacgtcgtcggggaaatagagcaacctcatccacctatcctggctgtgaaccgaaacgggaaaagcgtacactgaggcgtaggggaagggaaattcaaggggatgagtgaataaaatcctgttcggccaatcttgagcataaggttcgtcggtggcagagaaaccttgccgggtgcaggggtattcgagatcaaagtatgtacagacgttgctggcggggattgcgtagcgcattgcaagcagcccgtcaggatccagcggtgtgactgaaaaagaaagatgtagcgagaaattgttcagaaaggcactgagagaaaacgacgcttggaacgcgagggtggagggccatcccgtatggaaaaaattggcgggattgagtccgaagagtacatttactcctcctcgctctcttcttcagacgaatcagattcgtcatcgctgctttcgttgcgttcaaccgaggccactggatcaggagagtgagcgccaccctggaaacgagaaaggttgctctggagcatgttgatctgagcctcctgctcgaacttgctcattggcttgttcttcttgggcttgggaggtgccacactgctcgcaggaagatcgtcttcgtcttcatcatccatgagattcggcacgtgcttcttcacgaagttgagcaacttcagcaagacatcgttagggagctcgtcgatgtccaactcaatttcagcctcgtcggtaccctaaatctggattagaactggtctgtatgtggtgaacgtataagaatcttaccttaagttgaggaacattgttctggataatctggagggcttgctgcatccttttatcgggaagactactgataccgttcgagataatctgcttctcgttgtaggtgatagcgcgggttttgcctggttgagagatcttgctcttcttgtccctctttccagaactgatcttcttggaatccttcttcgcaagcttcttcccaaccttcttggaggaaggaggtgtcttctttttcttattggtaatagcctcgacctggcgagacatctcggcaatttgcttctgaagcagcgtgagtttctcgtcatcttcctcgctctcttctgcatcctcgtcgctgtcttcatcggaagaatcagtgttctgctcggggtgtggttcatgcgcttcgaggtagtccgacttctgggcccactttgcgttgaagatttcctccgcacgctggccacagacgaaagtgggatcaccggggatattgaagcggtaacaattcttgaaaatgaggcggacatcgttttcgaactccctggcattctcgtactggccggtcttaagtttggattgggcggtcgacagatccatcggcttcttgatgacgctgtggtatgtgggaatgttcaaagcaacggggtccacgggataatagaaaggcatcacccagctgtagtgcttttgcttgtgcagctcatccaagacttcctggcaaaagcgcagttcccattggaacttcttcttctttggcttggtagaatacgggaggtcacgcttcggggggtggatagaccgcttggggcgaccatcggggttcgaagaatcgcggcggatgacgggcagaccttcgggtcctagcgcaaatgtctgagactggggagaggaagccttgggctggcttggcagagaagtccgaggctcccggcgagcagcagacgtcttctcagtgtgcttctttggctttcgctcttcaacctcttcgggcttgggaaggttagtcatctgcttttcaaatgtcgccttcagcttgattccctcttgggtgaccaggtggtctgcgccattgaagacggtggtattattgaccatcagtgcaaagtcatctgcgactgcctggggggacgaatattggttgttcttgagcttcctttccatagttcctagatccatgggttgggtgataatagtgtggtattgggggatgttcaacttgatagcatccacaggttccttgtagaaacgcgcatcgtgcatgcgcttaaggcttgtaaggctcttcaaaatgaacttatgctgcatcttcgtgagccctggtccgccaccagtgcgggttggaccaggtgttgcagcagctggcgagctgtatcccggtgtctggaagttaataactaactcgtcgccctcgaccttggtccgcttaggagctggttcttcgctgagatcagcatcccgttgccgggaaaccttggaaggagatggcggggcctctgacccgtctttcatctcttggtcaacgtgttgcggcgcggtgagcacaggtgggagcgcaggtggtgcaggggccgtggtagggtgatgagggaggtcggttttcacggcagtcgaaacatcttgaggggtatcgataaccattggctcgggtgtgtcactaggaccatctgtcgatgcaggaaatgtggaaacgtgcgccgcaggctgtggggcggacacagcggcactttcagccgcggtgcttgctggagcaggagtggtagatacctggccctgtggaaggacgttcttgtcttcggtcggctgtgcctctgcgggtggagcagatcccgcggcagatggcgtcttgttttgatccactcctggagaggtttggtgctcgggggatttaggcggtgaggtagcaacgattgttccattggtgtttgaaggctcgacgggagtgtggccattgagcgcaggcgatttaacctcggtatccgtgggaccatcacttttgagattcactgtggcattttgcgcgctgcacgccagtcagaacaagaacagagcagatataaagctgatgcgcttacctggtgggtggatagtcaggcgcagaaggaccagtgggcgaaggaggcaattgaggcttgtcctcctttgtaacaggaggagcctcgggaggcggagtcgccattagggtcgcgttggataaacaagaatacaagctagggaagggtgagatggttgaagatgtgagagttataggagagtgtttgaaaagctagtgatcaactgaaaacacccgtcagatctctgcgcgaatcaatcttgccgcgtcacaatctcgagtgaacaaacactagcggcaaccaaagccacgtagtacggactcaatagttgatgaggtttgatatcacacgtgtgggcgcgaataaaacgcgacgggcggggggatagtgaggtcagagatgatcgagagataggaagagtggagaatgcgatcggagacaggtatttatactgccaagaaggcggtatggaagcgttcacgtgacgtagtagaattgacgccaggtctagatgacttggtacagcaagatatggagctaagaacttcccgtgaatgactgcctgaggccaatattgataaaagcgaattatgaaaataaaataatgaaaaaagaaataaaaaaagaattcggggtctgagggcggttaaaaggaaatagcaccgggtgacgcgagacgcgtttgttatgggcagggcggtcagcgaaataaaaataggagaaaccaggacggaagcagaaaaatggtcgggaggggatgccagaatccttaagtacaaacggccgccttgcacgcagttccaccagccacactaatcccgattctctgaccttcttaccccttgattggttctatacccctggccctttttccttttcttcttttcttttcttttgggaacttttcccttttcttatatatgaaggtgaatatactgttgaatatctttttcaaaacactgtttctttttggttttcttcttcggcttttctatacagttctcataaccttgaaagtcggtgggcgcatatctcggatgactcaaagccctagggttttggctaaatccggcttaggccgggcggatgggagtctgagtcacgtcaccactccatctttcacgtgactatatcatgatgagtacacgtattgtaattgataagaaatagcatccttctataacaagtactgagtactccgtattcggcgcaaggtaaaaacttgaatattgaatatccagatatcgtagagtagagtagctcactactatttgctgccaataatcctagaaattacaatcagcactttgcatttacatactacctacggagagcgtaactatgtacatacataccggataatgcctggcactcaagacctttccctttccgttttagtgctcacctcttgccgctttttgatcactgagtaaaactgagcacgtccctgagtatcctgacttgatcacgggccattatataatcaacgtgatctgctcactgagcatcacctgattatcccctgagccccctgatccactcactgatcatcatctgagcaccctgatttgcttactgagtgctctctgagtgtacggctgagcggcctgagtaagctacatcaataaattgcgacacgctaatcccatcacgtgcaaccctttccatttagatcgcccatcaaaaaaggactggcgcagtcaacgtgacccttcatcctagcggtctcgaccctatccaagtgaaaacctcgcagtggggctattcaattgacccatcattttcccattccagcctatgctcctgggaataccctcggaatacttcgcttaccagcccggcgatcctctaatcgggctttggactactaccagggcgagggcgattggacgaatttccttgattagagcccttccctgtatcaagacaactagagtaataagtgtttagcaggtgacgatgatgaactacttctctcgctaatgagcgtgtaagtcgaaggcgtttctgagcgtataacgtcatgtctttcgcgctatttctaagtaggtcgtaaaccgaagacaaaccatcaacagtaatacccagatgagctcctgggagcccgcgggctcnnnnnnnnnnnnnnnnnnnnnnnnnnnnnnnnnnnnnnnnnnnnnnnnnnnnnnnnnnnnnnnnnnnnnnnnnnnnnnnnnnnnnnnnnnnnnnnnnnnnnnnnnnnnnnnnnnnnnnnnnnnnnnnnnnnnnnnnnnnnnnnnnnnnnnnnnnnnnnnnnnnnnnnnnnnnnnnnnnnnnnnnnnnnnnnnnnnnnnnnnnnnnnnnnnnnnnnnnnnnnnnnnnnnnnnnnnnnnnnnnnnnnnnnnnnnnnnnnnnnnnnnnnnnnnnnnnnnnnnnnnnnnnnnnnnnnnnnnnnnnnnnnnnnnnnnnnnnnnnnnnnnnnnnnnnnnnnnnnnnnnnnnnnnnnnnnnnnnnnnnnnnnnnnnnnnnnnnnnnnnnnnnnnnnnnnnnnnnnnnnnnnnnnnnnnnnnnnnnnnnnnnnnnnnnnnnnnnnnnnnnnnnnnnnnnnnnnnnnnnnnngcccgcgggctcccaggagctcatctgggtattactagggttctaaaggttcatagctatttcgttctaatcctaggaattctaagcctcgcccgtttggcctagcatttctgcctaaagtgatgccatttcaaaggggaatatatatgcctagtcacttactccgaaaacaatggtcttcatcattcctctgcatccaagttacttaaccaaaacaaaaagcctgcttttgaatatatcacagtgagttcagccttcattcactcgtcgttctgcatcaactgaccgtactccagattggcatctcttttgcttacgatagtcgaatcgatcaacattgtcagcctccacgcccacgcaaaatctggaagctaccaaaagtacaaccgaggctttaacaacaggactgtgccatcggttgaaccttcgctgacattgcttcagggagactgtcatcagcattggatcaatcggaagctagcaagctcggtcatagatcccaacatcatcttcggttggcaatccggagcaacggagatacaggtattagattccaggacactttcagagaatggtctaaatactcggccagcgatactatacacgaaccggactaacatcgtcttgatttattttagaacataaaagtgcgactattgacagagcggctgcacacgtttgaaaataccacatatacgacgatagaactctctgcgtcgtatgtaaaagctctcaacattacaacactcggctaactggatcactatactagacatgctatttttctcacctctaagagcatcttcaataaggagagaaacgcagtattgaccacggaaatgaaatattgttgcagttgttgaaacaaataagtggcaacatataattcagaacaggcggctggcactccagcgcatcactcatgaggccgaaggtcaggccatagggatacaaaagtccttccttgagaccttgagaggggccatatccgtacttgaggcctcccttaaactttaagtctcgtgttcttcagtcgagtaagacctacggacgcttgctcctcccacattataggtggaccaacgggttcaatagtatggttcgagaggctcacgagcttggcagcttaatagtgggcttttacagtatgagctccggctcccaaaagggcccagacttgcagcgtcactttccccaagggggagcggaaatatggtgcgaatgcgtatgaagatggaaaagagccgttcttccctcgcctttgagaagatacatgatatttctggtgtgcatcttctcagtttgtatcatttcatgctgacttacagacaccgctctgaactgtcagatggacccagctttccctcatcttggaatagtgctggtccccagtaaaaagcttgggtgaaatacggaggacgcctccaatgggacgaacgcacggtatctgggtccttgatcgatttagatctaagacagtagaagggcccctccccatgctcctcagcctaccagctccgttctagaaccccaaacacgaggctggcggatcctcgggcattttgtcgccgataacatgccctgagcacgtcagatttatatgacagttccagtaacgattgttcctggaccagcggtcaatacgtgatttcataccttcagcaactccatttcctctgaaggcctgttttggcgttttgcaatggaatttgttaagattggaatcatgaccggagacgatttgaatgcttttaccgtggttggataataccatttcattaattagcttggttatgggtgtttggttccgtatttgatacatgtcgtcaatgtttctctccgtaaggtattacggctcttctggtcaatctgcacagccaccatcgcgagacagatcagccacaatgtctgtaagtctcgtaattgttgagtttactgaaacagaaatatttttgtaatataccgtcattgtacagtttccgccatccctgccttttccacttttagctgacaccaatttggtatcctcgggcagaccaatggaatgtaaataaacttaagtaagtgtcgcacaaaaacttatcggatttattgatttattgatgggaggctagtatttatgcgcccattactcgcatttgaaagaaaggccttggctacaatccaaaatcacctgcaacaggactaggcgaaaagaacagacatcgctactacgcatgaaaccaataggaagtcttgattcttcgatcctatcttgatacagattagcgcaccgagagagtatggttcgaaaagcagcataagagcacagagataagatctacctcgaaagtactagacatcaaattggaattcaggtgaactagtactgagccagatgcgaatctcctccaaggcatttaggtcattctagaaaagagaatgctgtaccttctcatcgtacaattcgtaagtatggcatcttctaggctctctcatacactccggcaagaaccaaaatcaatgaaaattgtccgatgattatcaatcattatattacttggataacgttgttataaaccaacccaagcggataaagatacttgaccctactctcgatgcccgtaagaatataactatagtctatcacttgccacgtgcttctcagtattctcttcataaggccgcgtgggttggcctctttcatcagcatgtgagggtatatctcaaggcaaaaggcccgtgattgtgccgtcagaaacctgacaaccgagatatgtagcaatgttgggacatgggtgccgccttaagagtttcgttaaattcttgcttccttgaggtcctctgcaatcgagtcaggtcgaggtccttgactgattcgatcgtaactgatcaattgaggctttttgacaaagtaattgttcggcagggtttgaggtgctggcgtaaactcagtagaaaattttggattgtaggctgagctaggaatttggataatattttcaaaattctctggctttcagcatcgcgtggtacaaatcccccttcacctgatacacaacgagggtacctgcgaaatggaagccttcaagccttcatctgagtcttcgtagacctcgtttctctccagcacctccagttgttagttaggatttggttaggtcgacatcgctcgagtgtactttaccgtgtcaatcattgagacaccaaatggcagatatgcactcacctagtaaacgtgcacgggaggagggtcaattagactatgaagcggcggaggtgtgaaaaagcgactgaaagattcgaaaggccaaacggcgtatgccatcgtcaaggaacgcaaccatgggcatgtcagggcttattcgtgaagcttctagggctcagctactttatagaaagatatttcatttgatgctataccaggctttgagcttctttgtgtacagcgatcaggttctctaagtgcaatatgggactgtaacagcagatttttctccgtgacctgttacctactgctcatcattctctagtgatggctaccaagaacaaagttgaagagcccatccctgatccagggaatctccagtgctacgggcttgtgctaatgctacttaaactggaaagggatgcactactaaatggatattattaaattactcacccgtggcgcaagtctgcggtgctttaggcaccaaaacgctttagcctttcatgctagctttagacgactggtaattatcgaactacacgactacttgatggtttcacgagggcctagatcgccctcgtcagtactctaaataggttcagcctttctggatactatgcgataggcaagaccatcgtataggaggtggctcacccaacgatatctatcattctcgaggtcctaatttccacttctaaatcaaaacggctgtgcgatctcacttggataaaccatatacgatgctaatagttagcaacattccttttagtctagggagaatagaaattactccacttcccgctccatccatatctcaagcctgtttgcgcctatagctatggctattagaggtcacgtagtccttttggtgatcttaaagaggaaaatagacacaactacatgatcggtccctcgttaagaataggctctgtgggttataaccgtagtactaccttaattgatggcaacggtcatttgcttaggcattgcaagaaagccagacatcgcgagttagcaactcttttaactattggccatagtaaacagcgtggttaagagtggttaagaagagtggttaagaagagtggttaagaagagtggttaagaagagtgnnnnnnnnnnnnnnnnnnnnnnnnnnnnnnnnnnnnnnnnnnnnnnnnnnnnnnnnnnnnnnnnnnnnnnnnnnnnnnnnnnnnnnnnnnnnnnnnnnnnnnnnnnnnnnnnnnnnnnnnnnnnnnnnnnnnnnnnnnnnnnnnnnnnnnnnnnnnnnnnnnnnnnnnnnnnnnnnnnnnnnnnnnnnnnnnnnnnnnnnnnnnnnnnnnnnnnnnnnnnnnnnnnnnnnnnnnnnnnnnnnnnnnnnnnnnnnnnnnnnnnnnnnnnnnnnnnnnnnnnnnnnnnnnnnnnnnnnnnnnnnnnnnnnnnnnnnnnnnnnnnnnnnnnnnnnnnnnnnnnnnnnnnnnnnnnnnnnnnnnnnnnnnnnnnnnnnnnnnnnnnnnnnnnnnnnnnnnnnnnnnnnnnnnnnnnnnnnnnnnnnnnnnnnnnnnnnnnnnnnnnnnnnnnnnnnnnnnnnnnnnnnnnnnnnnnnnnnnnnnnnnnnnnnnnnnnnnnnnnnnnnnnnnnnnnnnnnnnnnnnnnnnnnnnnnnnnnnnnnnnnnnnnnnnnnnnnnnnnnnnnnnnnnnnnnnnnnnnnnnnnnnnnnnnnnnnnnnnnnnnnnnnnnnnnnnnnnnnnnnnnnnnnnnnnnnnnnnnnnnnnnnnnnnnnnnnnnnnnnnnnnnnnnnnnnnnnnnnnnnnnnnnnnnnnnnnnnnnnnnnnnnnnnnnnnnnnnnnnnnnnnnnnnnnnnnnnnnnnnnnnnnnnnnnnnnnnnnnnnnnnnnnnnnnnnnnnnnnnnnnnnnnnnnnnnnnnnnnnnnnnnnnnnnnnnnnnnnnnnnnnnnnnnnnnnnnnnnnnnnnnnnnnnnnnnnnnnnnnnnnnnnnnnnnnnnnnnnnnnnnnnnnnnnnnnnnnnnnnnnnnnnnnnnnnnnnnnnnnnnnnnnnnnnnnnnnnnnnnnnnnnnnnnnnnnnnnnnnnnnnnnnnnnnnnnnnnnnnnnnnnnnnnnnnnnnnnnnnnnnnnnnnnnnnnnnnnnnnnnnnnnnnnnnnnnnnnnnnnnnnnnnnnnnnnnnnnnnnnnnnnnnnnnnnnnnnnnnnnnnnnnnnnnnnnnnnnnnnnnnnnnnnnnnnnnnnnnnnnnnnnnnnnnnnnnnnnnnnnnnnnnnnnnnnnnnnnnnnnnnnnnnnnnnnnnnnnnnnnnnnnnnnnnnnnnnnnnnnnnnnnnnnnnnnnnnnnnnnnnnnnnnnnnnnnnnnnnnnnnnnnnnnnnnnnnnnnnnnnnnnnnnnnnnnnnnnnnnnnnnnnnnnnnnnnnnnnnnnnnnnnnnnnnnnnnnnnnnnnnnnnnnnnnnnnnnnnnnnnnnnnnnnnnnnnnnnnnnnnnnnnnnnnnnnnnnnnnnnnnnnnnnnnnnnnnnnnnnnnnnnnnnnnnnnnnnnnnnnnnnnnnnnnnnnnnnnnnnnnnnnnnnnnnnnnnnnnnnnnnnnnnnnnnnnnnnnnnnnnnnnnnnnnnnnnnnnnnnnnnnnnnnnnnnnnnnnnnnnnnnnnnnnnnnnnnnnnnnnnnnnnnnnnnnnnnnnnnnnnnnnnnnnnnnnnnnnnnnnnnnnnnnnnnnnnnnnnnnnnnnnnnnnnnnnnnnnnnnnnnnnnnnnnnnnnnnnnnnnnnnnnnnnnnnnnnnnnnnnnnnnnnnnnnnnnnnnnnnnnnnnnnnnnnnnnnnnnnnnnnnnnnnnnnnnnnnnnnnnnnnnnnnnnnnnnnnnnnnnnnnnnnnnnnnnnnnnnnnnnnnnnnnnnnnnnnnnnnnnnnnnnnnnnnnnnnnnnnnnnnnnnnnnnnnnnnnnnnnnnnnnnnnnnnnnnnnnnnnnnnnnnnnnnnnnnnnnnnnnnnnnnnnnnnnnnnnnnnnnnnnnnnnnnnnnnnnnnnnnnnnnnnnnnnnnnnnnnnnnnnnnnnnnnnnnnnnnnnnnnnnnnnnnnnnnnnnnnnnnnnnnnnnnnnnnnnnnnnnnnnnnnnnnnnnnnnnnnnnnnnnnnnnnnnnnnnnnnnnnnnnnnnnnnnnnnnnnnnnnnnnnnnnnnnnnnnnnnnnnnnnnnnnnnnnnnnnnnnnnnnnnnnnnnnnnnnnnnnnnnnnnnnnnnnnnnnnnnnnnnnnnnnnnnnnnnnnnnnnnnnnnnnnnnnnnnnnnnnnnnnnnnnnnnnnnnnnnnnnnnnnnnnnnnnnnnnnnnnnnnnnnnnnnnnnnnnnnnnnnnnnnnnnnnnnnnnnnnnnnnnnnnnnnnnnnnnnnnnnnnnnnnnnnnnnnnnnnnnnnnnnnnnnnnnnnnnnnnnnnnnnnnnnnnnnnnnnnnnnnnnnnnnnnnnnnnnnnnnnnnnnnnnnnnnnnnnnnnnnnnnnnnnnnnnnnnnnnnnnnnnnnnnnnnnnnnnnnnnnnnnnnnnnnnnnnnnnnnnnnnnnnnnnnnnnnnnnnnnnnnnnnnnnnnnnnnnnnnnnnnnnnnnnnnnnnnnnnnnnnnnnnnnnnnnnnnnnnnnnnnnnnnnnnnnnnnnnnnnnnnnnnnnnnnnnnnnnnnnnnnnnnnnnnnnnnnnnnnnnnnnnnnnnnnnnnnnnnnnnnnnnnnnnnnnnnnnnnnnnnnnnnnnnnnnnnnnnnnnnnnnnnnnnnnnnnnnnnnnnnnnnnnnnnnnnnnnnnnnnnnnnnnnnnnnnnnnnnnnnnnnnnnnnnnnnnnnnnnnnnnnnnnnnnnnnnnnnnnnnnnnnnnnnnnnnnnnnnnnnnnnnnnnnnnnnnnnnnnnnnnnnnnnnnnnnnnnnnnnnnnnnnnnnnnnnnnnnnnnnnnnnnnnnnnnnnnnnnnnnnnnnnnnnnnnnnnnnnnnnnnnnnnnnnnnnnnnnnnnnnnnnnnnnnnnnnnnnnnnnnnnnnnnnnnnnnnnnnnnnnnnnnnnnnnnnnnnnnnnnnnnnnnnnnnnnnnnnnnnnnnnnnnnnnnnnnnnnnnnnnnnnnnnnnnnnnnnnnnnnnnnnnnnnnnnnnnnnnnnnnnnnnnnnnnnnnnnnnnnnnnnnnnnnnnnnnnnnnnnnnnnnnnnnnnnnnnnnnnnnnnnnnnnnnnnnnnnnnnnnnnnnnnnnnnnnnnnnnnnnnnnnnnnnnnnnnnnnnnnnnnnnnnnnnnnnnnnnnnnnnnnnnnnnnnnnnnnnnnnnnnnnnnnnnnnnnnnnnnnnnnnnnnnnnnnnnnnnnnnnnnnnnnnnnnnnnnnnnnnnnnnnnnnnnnnnnnnnnnnnnnnnnnnnnnnnnnnnnnnnnnnnnnnnnnnnnnnnnnnnnnnnnnnnnnnnnnnnnnnnnnnnnnnnnnnnnnnnnnnnnnnnnnnnnnnnnnnnnnnnnnnnnnnnnnnnnnnnnnnnnnnnnnnnnnnnnnnnnnnnnnnnnnnnnnnnnnnnnnnnnnnnnnnnnnnnnnnnnnnnnnnnnnnnnnnnnnnnnnnnnnnnnnnnnnnnnnnnnnnnnnnnnnnnnnnnnnnnnnnnnnnnnnnnnnnnnnnnnnnnnnnnnnnnnnnnnnnnnnnnnnnnnnnnnnnnnnnnnnnngtggttaagaagagtggttaagaagagtggttaagaagagtggttaagaagagtggttaggaagagtggttaagaagagtggttaagaagagtggttaagaagagtggttaggaagcggttaagacctgaacgagagttgaaggttaatcggggaacgtttcgatgtaagtcttggtcatatccagcatttgctcaacgcatccgagcgactctctcattgaccgatttagcaaacaaacctcagggcgcactattttgagccctaggcggtccggtccaccttccagcgacgagaaaagttgattgcaccatctaggaatgttggcattgtgaaaacttctgcataaaagcccaggccgatacataaatctgcggtgtacaactactcttcattctcacgagcccggcaacgaagatatagaatcataaaacgacaatacttgctctctcttttggcaaccgatcattggcggaacaatacccggcaccctcgtgtgatgaaggtagcaacttagccaagcgcacgcatgtgagtctggaaactaaggtggtagcttgccgtgtactgctgtattgacattctgatgtcatgctctgctttcaaatgcgatttttgcccgagatgaagcgtcctgcggcggacgagtgtgttgtaattgaaaagtcattccattattcggatagccgcctgcgaaagctccgatactatgtaacttaggatggcttcgtgcgtggggaaaacactgcgcgcaaataccgggaaccaaaattgtacagctgcttttagtttttatcttccgcaacagagctttgaagatcaacacatggtaagaagtagtcaggatcgtttcaaatccagtcaggagagattttgggcttgtattctagagttcattcataatcgggtttttctggcttatatatctttcaatccgcgcaaggttcctctgaccatgccttcgcgatgagtccctgacattttgatcaatggaactgtcgtatacgcgaaacaacctgagacgccaatgcgcatacatggacaatgatcatcaaggactaatcacaagcaaggttgattcccatgcggctaattcaaacgctgtcacagacctaggcttgaagccattatagtacacacggaggttgcctctgccaacagaaccatagactctgggaggcagtgggatgtttggagatcagatgagtctgcgccttagctgcagcaacccctggtcgtttgtagccaatcaaaccagtacccggcagagcaaaatgcatcccaggagctttggtattatctttaccacgaaaaaaaaaacctaggcagctagcattaaccagccaatcaaacaaagtatagactgagaaatgctaccttctgtgaatctatcctaggagcatttgtatcatgcaaagaccggggtaaattggccaatggttcatcacactatgcacgaaccttgattcgtaagtagctcttggcactttcctggcactcttctggcactcttctggcacttgctcttcaacccttcagaatgtcatccaacctacctctaacaggcttgatatatggatcgagcggaaaatggagtaacttctattctccctagactaaaaggaatgttgctaactatagcatcgtatatgctttgtccaagtagaatgcacatttactacctcggcgccgaaaccggattggaatgatttcacgtttcagaagtcagtttgcagcatgtattcaaaccgttgctggatatttgtcccgcgaggtatcgatgagaacgcatacagccggaataatatctagaaagtcgggtcaatattgatgtcaaaagatataatcaagcatagaagcaagaccatagctgcagcatccccctctgtccatgaatgctcgtcaataactactatcacccacatatacccgaccagatagttcctataccctgcgcttaccacggacttacatagatcccaccaacgccgggattagacgcccagaaactgccaagtgtcccgcccagaccttcggccagtagaaccccgcgaatggccctctcggcatatagcagtaagatgagcgagttctcatacggctcgtatccaattgcattagcgcacggcgttgcagtgccttaaagcaggacggtcgtcccaacaatctcgcagagtaactcctccacttcacctcaggcaataggctttccacgcctcatctcacaggaaagatgaacagcatcaaagcccgattcaagaggatgtcaataggtcggaccgggaaggatcccaatgcaagtggaaagacagacgccgcagcctcggcagagaggacgccaaacgaaggccggaagaatgcgccagccaattccaatgccgcgaatgttgacagtggtctcgctgccgcgcggatgttcatcaaagacgaacgggagggcagtttggtgtttaccatccaggttgcgaccgcttatcgcccgcgcatcgcggtggatgtgcatcggtttggcaaggaacaaggggacgggccatatggaaagctggccggcttgatgaagatgtcgggggcggagcacgggttcgtggaggcggagcatccgtcgtttggttggagatcagatgagtctgcgccttagctgcagcaacccctggtcgtttgtagccaattaaaccagtaccgacccggcagagcataaatgcatcctaggagcttttggtattatcttaccacgaaataaaaaaattagaaaaaaataggcagcagcataggctggctctggggctgattccgtttgtggtcaacgaaaaaattagcagagaataattgctttttgtaaaacgtccaacgctgaacatatttaggtgccgcagtttcctgccgcagcatgtccgtattggcgcaaatcccaacgtgtacggccccaagagcttcagccaccattccatccccccgcaggagcgtggtttctattgtagccaataataacggaccgaaatgccaagcccaatcaaagagcggtgtctgtcgtgtccttcgtgtctgtcgtgtccatcgtgtccatcccgtcgtgtccgtctgtcgtgtctgtcgtgcccatcgtgtccatcgtgtccacaaactcatcgcggcaaatatgaacaaattcgctccaatatacgaaaaacacaaagatattggtgcagaacaaaccattcccgaagccgacatctcactatttgaagaacgcttggtcatagtttgcacagtcgacgagacacaaaaccacaggcgtgtgagaataccaaaccgtgtgaaactcatccgatctcgagagcggaaggctcaaaggctttatctgaaaatcctcgagaagtttcctggcatttttctcgctttcatcctctcagtctccccgagagcttctgtagattttgacctttcggccttttgtgagcaacacactgaacaacctattgttctctgcgacaatgctgaatcgcttctttggcgaagtgccatcagacacggtattgagaagtctaaagctttcggaaagttgatgagtctacttttcagcttgcctcgcccagcgacagaagccgaaggggaagaaagttgttcgttatctctgagccgtctttctgtgatccgcatcgcttttggtgatataatatgtgaggcagttgaatgttctcccactcatcttccaatgaatgcggacagcgattatgcagaaataacacagtgtgtcaggacgacagtattctataaccaccaggacaccatcattcatattgatgtgggctgcgcggtcaagctcgctgacatgctcttcccttctgcaagcagaagaatcaattctgctctctcccagtccaatgccagcattcaggcgcggaacccaaaggctgtcttgctcccagggatgcaatcagaatcactggttcaagattacggtacgaaagagtggcgttccatgacaatgcagtgtattaattagccctacagatttcgcatacttcacgttgcgtggtgcgtctgttgccggcataagatcggtgttcagtgcctccatctgtgaagctatagaggagagcgaattgaggagatgggaaaagcaccatctgcttactgaagttacagactgtatcacgatgcagctatggagagcagaatcacaacgtggtctcattaaattgcgagttggatactatacaggagtcaatttggcaaacaaactttatgcagaaccccgttcatgcatcgcttcttgaatcgggccgtcaatctatttcggtgcaccttgcttttccttttcttatccaagctccaacgttctctggaagaacaattgcgccactcccctttgtctcgcatatcttctcccctccttgtttctgaaatcttatatactcgcattccaagcaatataaatttcttgggaaaggttgcggctcgatatcggtaattggaagggctctgtattttgagaggcggtcgacttcttccttgggaagctccttccactcggcctgagataggcgctcgctctgggataggtcagaccatacatcctagaaggcatattgtagcgactcaccaaggacttttctgtgattgaatctgccatcttcagcgaatgtttgagcaagaaaagggtttgcttgcgcgacacgtcttggatctcttcggtcgagatgggagtaactctcaccgcaagattttgaggtgggcgtgaacgcaggaaaagtatgccacaaatttttgcccagattgaatagcctctgaggaatataaaatataaagacgagactgggcacgaagaatgaaccttgggaatcaaccgcgggttaggcatcggctgaaaattgcccaactctgcccctcattcttcttgcacaatggtggggccaccttgtggctccggaaatcgccacccacacgtgactcgcaattctccggcaatgcgtaatgacattaaccgagatccattcgatcgaggagatagagtttcaaaacagctaaggtgtccaaggtgtccaaggtgtccatcgtgtccatcgtgtccatcgtgtccgaggatcgccatgatggagactttagcttgtgccgcagcccaggctctggtagtatttctactttgactgagcttgatccccatttacctacctggcgttccttgccttctcggcaccacaaaaagattgctgcaaaatctagtttaataagtcgtaataatctaatttgtacttgatgaccatttctaacattcctaatttctatatagatggatccatggcagacatcatagattggcaacttataccgatctacgacaactactttcatgcctctatgtccacgaataaatgacatattgaaataactgcatctcaaccgttatataagtcatccccaagctattctgcaggctgtagggggacaatatccatgatcacatgcaaaactgcaaagacccagatacgagtcgtcttcgccgataagaggcgccccacgagctccagttgatggtggaagcgggattggagttccatactgcgtacaagtgcagggtccagatggacaataaccatagctgcaacaaaacgaacacaacccgctgtagttgctggctcctgttcctgcaatgcaggccctattcctaccaccaccccctcctcctccgcccccgccgccgcctccacctccagcatttccaccgccagttccacctccgccgcaagttcgggttggaggtgaacttggtggagttatagcctcggtaactgtcacagtgacaacagttgacgaaatagcagagcatggtccaggggcttttgttgtgcccggaggagaacttggcaatatggtgctcttacttggagatggagcaggtgggggtactgtacttaatgagggggtaggttgacatgtccggacacgcaggccctgtgtgaaggcagagagcccttctggctggagggcatcattggatcctggtggaagcgttccgactgcacgtcaaagttaaaagggggctatcagcagtgctatatcttcacttaccgtaggcgttgaagttatacaaaccacacacgcacccgtcgataacctccttcaaactggtccctgacagaatggtctcgccgtcgcgattgacctcaaagctttgtgtaccaactcccattggcacctcctttgcacttgccccggctggcgcttcgtaattatggatagtcccgccgctgttgacctgcactgtggctggggctgtaagcaatgatacaatgaagacagagtcggccatgaattcccagccatctggacgacccatgaaatagttcccactgccattgttcgctggtaccatgcaggtgtctgtagagtcgcagttcaccccacgtggtgcaggtcggtaccagtagactaactcatcagatgatatatgactgtctggagacgactggtctgctttgaacgcggcgatgtacggttttgaaatgtccagccatccttcgtggggcctgtagttatacattactttggctcccgttttgaaggtttccacgggtggatttgaagttctcacatgtcgttaacccatttagaggccccgtcgtcagtgtgcggtgatcccaaaggaccaatataatgagactctccatagtcattccatgttacaatctcgataaatcgcggtttcaactcaagaatctcattccatctgttaaaccacaggagatcagacgggaagttccagtttttgctataagaaacttcgggtccgaaatgcgtggaaaaccacggggaaacagctgcgtcaaagtcagaaaaattaattcaaatttggatgaaaactaaactgacgggcaatataggccttccgccaagagcatcgacatattccctatcaccgtcggcgacagaaatactctgctctgcagttggggctttgttctttccgttgtttggccacgccatccaattcaagaggccgtcaactggcgagatatctgtcccagttgatgggtggaaattcggtgcgaaaaagaccggtcttccaactgctgctcgcattgctgcaacattcattccatcaccagcgaatgatgaaacgaataccttgtcatcgacgagaagttgtgcaggtttgctagcatactgggcaaccttctggccaacttcggcggcctgttcaatatgccaccagttgaaatcaaatgatagaaaggctttcatgtcattgttggcggctgagtcgtatgccagttgaagttgttgatcagtacagggatctgtgccaatgttcagagcaaacgcatcaatgcctagagacttagcccgtttcatgtcgtcatcgtagtccgatgcgctgtttctattgctgacgattccaatcttttaaataatcagtatatgttcaacagacacaaggaacttgagggcatatttaccataaagtgtgcaaagaccagtcggtctgtcgattgtcttttgacacgacgtatgccatgattccccgtagacagtgcatgaactatagtggatagtaaagtaataacacacaaaatgaaccgcatattcatcatgatttgtaagttcacttagttcatcttgggtcaatcttcaggattctggtttaggtatccatatgtgtgttgtgcgcgttccacgcctttaaatagtcctttcattctccagatgacgcggagcttctcgctgctgacctacgaagcttaaatatcaggatgatgagtgtgatatttgatagttatctctccgagcccgatcaaagccttacattcagggaaccatgtggttgttacagagctttgggcgacatcatcgttgagtgggaacgctattgcccacaagttctcgttattgcgcggttttccgcttcaattaggtacagggtggccgccggatgattccttgcgtagtagtggttgtttaattctatatagttatacatgccggtgaccgtacacaaatcaaaaggtaggaaatggtagaagccgtagaacatctaagcccttgtgattcgacatgagcgtaggggtcgatggatagttctgctgggcttttaggattacactgccatttttccggaactgcatccgtgtctgccattcaaaaaaattgtgtagtttgttggtgccagaatcaagaacactattcagaaaagccatcaaattacaccttgtactaaccacctcgtcatttagcctttgcccttataaatatattccgtgcagatggattcatggaaaacttggggcaagataaccattgaagcctttacataaatgtcaaataatccacacaagtgacaatcaacttcacttggttctagatgcagccccaatccattagtgctcaaatctccgcctgtctggcgcatttgatctagtgtagtacaaattttcttcatcttgcttgaagtacgctgaaaacttaattcctgtaaaaataaagcggttgggtcgcttttcagtagcagattcgcgcccattgatccgggtcttcagagttgagacaggtatctcaaaaggtcgtgcagcagcagctgcagggggatatttgccattttgtatagcttgtatggctaatagaaggcgaccctcctgctctatcaaattttctttcttatcggggcgtttgggggggggnnnnnnnnnnnnnnnnnnnnnnnnnnnnnnnnnnnnnnnnnnnnnnnnnnnnnnnnnnnnnnnnnnnnnnnnnnnnnnnnnnnnnnnnnnnnnnnnnnnnnnnnnnnnnnnnnnnnnnnnnnnnnnnnnnnnnnnnnnnnnnnnnnnnnnnnnnnnnnnnnnnnnnnnnnnnnnnnnnnnnnnnnnnnnnnnnnnnnnnnnnnnnnnnnnnnnnnnnnnnnnnnnnnnnnnnnnnnnnnnnnnnnnnnnnnnnnnnnnnnnnnnnnnnnnnnnnnnnnnnnnnnnnnnnnnnnnnnnnnnnnnnnnnnnnnnnnnnnnnnnnnnnnnnnnnnnnnnnnnnnnnnnnnnnnnnnnnnnnnnnnnnnnnnnnnnnnnnnnnnnnnnnnnnnnnnnnnnnnnnnnnnnnnnnnnnnnnnnnnnnnnnnnnnnnnnnnnnnnnnnnnnnnnnnnnnnnnnnnnnnnnnnnnnnnnnnnnnnnnnnnnnnnnnnnnnnnnnnnnnnnnnnnnnnnnnnnnnnnnnnnnnnnnnnnnnnnnnnnnnnnnnnnnnnnnnnnnnnnnnnnnnnnnnnnnnnnnnnnnnnnnnnnnnnnnnnnnnnnnnnnnnnnnnnnnnnnnnnnnnnnnnnnnnnnnnnnnnnnnnnnnnnnnnnnnnnnnnnnnnnnnnnnnnnnnnnnnnnnnnnnnnnnnnnnnnnnnnnnnnnnnnnnnnnnnnnnnnnnnnnnnnnnnnnnnnnnnnnnnnnnnnnnnnnnnnnnnnnnnnnnnnnnnnnnnnnnnnnnnnnnnnnnnnnnnnnnnnnnnnnnnnnnnnnnnnnnnnnnnnnnnnnnnnnnnnnnnnnnnnnnnnnnnnnnnnnnnnnnnnnnnnnnnnnnnnnnnnnnnnnnnnnnnnnnnnnnnnnnnnnnnnnnnnnnnnnnnnnnnnnnnnnnnnnnnnnnnnnnnnnnnnnnnnnnnnnnnnnnnnnnnnnnnnnnnnnnnnnnnnnnnnnnnnnnnnnnnnnnnnnnnnnnnnnnnnnnnnnnnnnnnnnnnnnnnnnnnnnnnnnnnnnnnnnnnnnnnnnnnnnnnnnnnnnnnnnnnnnnnnnnnnnnnnnnnnnnnnnnnnnnnnnnnnnnnnnnnnnnnnnnnnnnnnnnnnnnnnnnnnnnnnnnnnnnnnnnnnnnnnnnnnnnnnnnnnnnnnnnnnnnnnnnnnnnnnnnnnnnnnnnnnnnnnnnnnnnnnnnnnnnnnnnnnnnnnnnnnnnnnnnnnnnnnnnnnnnnnnnnnnnnnnnnnnnnnnnnnnnnnnnnnnnnnnnnnnnnnnnnnnnnnnnnnnnnnnnnnnnnnnnnnnnnnnnnnnnnnnnnnnnnnnnnnnnnnnnnnnnnnnnnnnnnnnnnnnnnnnnnnnnnnnnnnnnnnnnnnnnnnnnnnnnnnnnnnnnnnnnnnnnnnnnnnnnnnnnnnnnnnnnnnnnnnnnnnnnnnnnnnnnnnnnnnnnnnnnnnnnnnnnnnnnnnnnnnnnnnnnggcgggcgcattgttgttgtggcattgatctctttccatggtgcgttcttcagaagaagtcgtccctgttgcttcggggctgaccacggtgcatcgaacacagtctcaatcgcacggtgatccgagccgtgctctgtcccatgtatctcgagatagagaggcagagggttggctacttcctacagtgcttacgcagtgcttacggggcagcttccgtgttgccttggttctggttcgcccactggagaaagggtttggggtcaagggtttgagagcagaaagagccatcggagcagcaattgcaaaggaagctcacataggtaaacgggcggtacctcaatcattataccgaaacggtggagcttatgactcactggagttcgaaataatgtagtaagggactatgcaatcgaatgggtaaaaattatggtttggagctctggaaagtgcttttctatctcataggcttgtatatacagtaacatttcaagtaacacctacacccaaccaccgtaagtgcttggcttgcagccaattccacgaaacagctcactgaaatgcgagatgggcaatggcggttcaaacaggaaactcacgcgggttggcgtgtacaatgcgtgagttgtggttttctaggaaaggtgttgcgtcaaatccgttgacattgtggagatccgctaactgtgcagcaagaggttcatctccttggggccacctgattaaaacccagtccggccttttcccgtgctgccgaagtacgaagactggcaaaatggtcttagctttgtgcgctgtgccgaaatcataatcatgatgattgatgtcgatgacaataaaggtacgttcactccacacgtctatggcaagcaagagaatgcggggatcgctttcccagtccggaaaaacctcgctgacaactgtgtttgctgaagcacgatagtcttggggatccaaactttcggttttcactttgatgacaattcgttttgcaatgtcgatttcgaggatttcttttcgtatatcagataggttggccattattactatgcaatctcgggtctggtgttcgaactgggcgatatagtatgagaaagttcagaaaagcaatttgtgaaagtcaggtagagatttggagacgaacaattattgcgtatggtaaatgaatgaagttacacgaccattcctttttatggctgggatcacttattaatacgctaatcctgaacgggtaagtaatgccggagaaacgccccttaccttaccaagggtcttgctacgtattaaggcaacctatccgatgaaggaaaatgggggtacatacaaggttagtgttgcccatagagaaagacttataatcacgtgttttcttgttacttcatacaactaaatacaagatacacgcaacctgagtctatgctaccccaatggacccatcaactgaatgtcgtcggctgactattcgcgtctcgcagcagctagtgaaaactaggtaaaactattttcggagcttgacggagaaagatatgaatgctgtgcgcatttgcctggtatccacacgatctcccaaacttgccggggatcagttgtggtaggcagacaattgcctcgatcacagggcctggctttgtcggcacggaaagggcatccgcagccttggtagtacttgtcgtcccagttgcacatctattgaaaattttagagaggtggtctatcaactaggtacaatagcttggctttaccttcgatgcaacgtattgtctaacgcgcctttgaatgacgaaagtttggtgataagcaagctggaatcggcctgggcgaaggaatgatgtggaggataataggacgggagttggagaactgtgtatgagggttgttgcggaagcagtagggaaatgcgcggtgattgcgtttttatatgcagtttcatgaggttcgctccaagactacattttggaccaaagggttgtagagggacggccctcgcaaagatgccgtaacggaacgaagcatgcagatcggagatggatgccctcatcaccaatggcaaaatgccagcagcagggaccccgttagctcggagacaaaattcgcatcccggcgaaatgagagacgcagagacatccttacgatcggagatgacacaaggctggctcatagctcagcgtggggacaaatcatcccgcaattggtggccaacaaaggagatgcatcattatgcatactaggagcatctgtattatctagagactgcgtagattgggccaatgattcagcgcaggagcttcagccaccactccatcccccccccccgggcagaaggctggtttccattgtagccaataataacggaccgaaatgccaagcccaatcaaagatctgtgcccatcgtgtccattgtgtccaccgtgtccaccgcgtccatcgtgtccaccgtgtccatcgtgtccattgtgtccaccgtgtccatcgtgtccatcgtgtccattgtgtccatcgtgtccattgtgtccaccgtgtccatcgtgtccatcgtgtccattgtgtccatcgtgtccattgtgtccaccgtgtccatcgtgtccatcgtgtccattgtgtccatcgtgtccattgtgtccaccgtgtccatcgtgtccatcgtgtccattgtgtccatcgtgtccattgtgtccaccgtgtccatcgtgtccatcgtgtccattgtgtccatcgtgtccattgtgtccaccgtgtccatcgtgtccatcgtgtccattgtgtccatcgtgtccattgtgtccaccgtgtccatcgtgtccatcgtgtccattgtgtccatcgtgtccattgtgtccaccgtgtccatcgtgtccatcgtgtccattgtgtccatcgtgtccattgtgtccaccgtgtccatcgtgtccatcgtgtccattgtgtccatcgtgtccattgtgtccaccgtgtccatcgtgtccatcgtgtccattgtgtccatcgtgtccattgtgtccaccgtgtccatcgtgtccatcgtgtccattgtgtccatcgtgtccattgtgtccaccgtgtccatcgtgtccatcgtgtccattgtgtccatcgtgtccattgtgtccaccgtgtccatcgtgtccatccgaagatcgccatgatggagacttagtctctgaaatctggactcttgagtacgttgctaaagactgtatcaaatcccgcattgacctccgtcgaaaagtaaatccatctgatcgacctcacgcaggaaacaaccattcagtagcaagtctgaatccggagaaccatagccaacgatgacatccgcggtaccatacgagaatttgtacgtttcaggggtatatagtcttgtgtattgataacagcctcgataatgcggacaatccaccacgcttggtgtggagttggccttgaaattggatgggcataactaatggtgagaacaggggtagtaatgggacattggtacgattcaaacgatatataatcttgcatatctataagatctcggcatcgtaggtccttcaattgagtgctgtgctgttttcaaagtgtccctgcggagttcaatactttccctgtctctcaaaatcaaagtcttgtgcgaaatatgggtatatcaaataccctctggtctcgttttatcgaactctttagacactatagggcgaggaagcagtcacaggaaggccttcaaggtttggatgcgtttttgacaagttagactgcaacataataaccgttgatccagaagtggtgtatcagtgttcggcaccgtatcgtagaccttcggtcaaattaatttatacagaagagcttaacgagcttgcagtgagtgtcccggaactgttgcattcagtcatcttccaatccatggctctaacgtataataaatagaaacaacagtctagttcgaacttcaatatcggtaatctgcgcatacgcatacttggataactggtagatagcagaagtaccattatttactatatacagcgcgaaatcaggaaaacggaggggatcccggggacaaaggatcttatataggagttgcagtttaagcactactaggcctcgcagacagagctgattaaatcttcaattggacgtgatctcctacaagccgaggcctccaaaggagttggcgagcccttgcctaaagattcacgcttttaattattcctgattcacccagcttctctgtaccctagatagtacctttatacagttaatctaaattatatggccgatgaatcagagcggctgtaaactagaacctatgctggaaggataattaagccaaggccacagtcggtcgaggctgagggctttggtattataatcttgatcaaattctacttgcatccccaccgctagttctatccagcaattgcatctactagtcttttggatctgtggagatgcgttggcgagccagccctcacctataaagcctgagtcttcgtcgaactgacagccttctgtttcctgttctgaacaaactatttcatttattagcttctattcactttacttcaagatgtctgacatggaaggcggctcgcaatcttgatacaagctctggtaaaaacgggattagactatatttatccgggatgttttaagctcttttcagatccaaatgcttgctacagtcattatcgaaaggaaggggataaaggggatgatatccacaaaggtcttagtctaatcacgaagaaagattttccgaaattccttcaatactaccaggttactattggcttctagatagaagaaagagctcttcccttaggagagggcccaggacgccgcttatactacgaatgtttctctgttaagtttatacttaacaattgtagtcagtcttttcacccaaacgcaagccctatgtgtcgaactgacgataaaacagtcgcaaaaagagaaataatcgacgcaatgcggttggccgtgattaagatctaaatcaacatcccattgggttagataaagtcatggtagtgcgttgcagaggaaactcgtcgaccgacggcaaactaacatcgcaatttagataccgacagaaagctttcaatttgaccccctcatccaacggcagtctttgacagctggggggcaggagaagagcaaaggaaacgggcttggcgaaaaaccagttggaggcgtggtataagattcagtgatttgaagttggattggacagttgtatatatacccgtctttattatttcccattgactagtatgatgcggataggccaagagatggtcaaaactaggtatataagaccccgtcgcctataatcatatatcgttctaatagctgtaatagtccccttaatctttccttaaagtttgctaacgtgtccggttcacacatttttgtatagctgaggtagatagatcggtacactgtattaaattgctcgttaaagttagcgaagaattgaaggagcccctagggtagaggcaccattttcaagctaaaataccaggtaagaagagaaagtatagctaaatcacaattagcgagtttacctaccatacggtaggcatagttcctcagccatctgttcttagctaaggctctgcgttttccctaaggcaagtagcgatactttctaagtacctggcaggaggatatcaagaatgtggtcctgtcattgagcttgtgctgtcgtttgattgcgcgcttgaggtatttcgagcctagaaaccacacttattaaataattaaagtcgtttcggtggctcggaaactggttcttaggaaagaaaacttcatagtttagcatatcactgtatataatccagtgattgtcttacatagaagtcttcaactagcgacataatagcaggtgcttaggattctattggaatactagagtatggttccggtataagataggctggtccagtatttgtattatgcccgagatactcctgggtcccttaatctagattccggacgaataagaagaggttatttcctagatataatattggtcttctaatagtagtatcgccataccacagacgctaacaggaggctttcccggcctattaagagcaagtattttggcccactcccaaatacaaagcctttctaaaagttgaaatttccgttttactgaaaaataatgtaaacttagcgccattgggcagccggaatacttctagcccttcataccatgtgttatctgcgtccgcctggagcggatcgatgctagttcagggccactgtggagatcaattatatgcagctttcattggataactgactgagtgcccgagaactgcatgccgatctcggttatagggataattttctccattgcatttctttttgcgccatttcgaattaccaagaaatgacccttcttacttggtccctgcacatgggggttctcggagtgcccgagtgcattgcttagaaaggatgttttatttgtgccagggcgttccccaaactccagctcttcaactccctcgtacagtaccgtccattgcatacattgcatccctttcagtcacccgcaatggactttcgaccaatcttccaacatttttctcatagtgagtaaacttatcatcctgtcaacttcgatactgataggcctgaagccatagtcttgaatgacccaagagggtattctatgacaccttgcctcagtattctggcagcatgtagagagagatatggtcagcttgaaaccggcgcactctcacctgcctacatttacctggtcatgatcgaaaattcgacctactatacaatgaacggagaattgggtcagcttcttcggcgattattgtatgatcatcttcaagaagagtggctcaaagaaactgatatgggccgtttcattcatgttactctagcggtcaaaagagaagtgcttattcggtgtgatatattttatgacatgcgcggctatacctcagtagccgggaatgtggaggggactgtcctcgccgaaagagccattctggagacgtttcagcctatcttcgactctgatctggctatcggagcgtgggtgattgagttctctttttccgacttccggccgagggtctctcggataggttcacttgaggatttgtgttcgatatttcgccctgtatgttaaattttgtcctcgattgacaggacatttaagaattgatatacatggatttgagcgtgctcacagcatagatgcgagcttttgtatagaggcatgatctttttattagctgcatgcttgaagttctggagacagctaaaatagcacacctacactacccatgtgtacttgctttctccagttgttagtgtcagtatacgagttaactttctaatgtctttatgataagagttaggtatgaagcaagccttggttatgtattagcagtgatcctaatgcatgtgtttgttcggatcgggcaaggtcaagcaatggagaaggggaatggagaatgacattattgaggtaacagggtgagatttgctatggtggctaacgtagagcagcattaggtgtatatacatactggtaagaacgaaaagaaatactccattgagcagctattgacagattgctgcaacgatgataacataatccgacgatttaaatatacaagaccatttccctttaaatatataatattctataagccctagtagcctaataaaccttctcttaaagctctttatagattctagttcggctattattgtatatcggcgatgaatattagtataaatatcttcgaagattttcgaaggctcgtcgaagaatagaagaagctgacggggaagaggcacactaaaatctgcgttgaaatgccaggtgagaagtgcgaatattttcagagagtcgtcggtgaggtcttccaccatggcttgcacaagccgattcaaaatgctgttctgggctaaacgtttccgtcccttcctgtatccattcttcctgagatgctggcaggctaccactagcgatgcaatctcaggatcgagatcgtgttgccatttaactgcatttgccaggtccggggtacccagcgaccagatttgcaacgcttttaatgatgtttgggctgatatcttgaggtcggcttcgaaatctgtataatcaatcttaataatcaatcttagtacgggaatagaacgaagccatttgcccttaccatagtttccgtgataaaggcagacggtggaggactgggcaggtgtgtgcacaatcgaagggacaaaccacttgcatggggatctcccatgtatattagggttttggagtgggtgtgatatacctcggcgcacggacgcgaatattacaatacctttcaattaaatggtaattttcattttttgactgcgcttgtaatgagacggacgtgccctacttagtattagtagttcatgaatgctccatacccgacgtagcgaagtgtcctagcagccaatcccacctattccttgtgtaaacatccttgtaataacgccccttgccttctttgcaaatttttaccagctactctcatgggatttacaaattaataagtgacccagaacgagctagccctcagtaggcaagcatcacaagtttccccgcccaacaccgcggagcatgaaaggctctcataagcaagggagcgggggttcccctttacatcgtatataacccccatcgccgcttgatcttcggccagataagaccgactctctttattcctagttgcccccgaatcatcccaacttcaattctttggaccatggcaattaacaatagctattagcttccctacctagatccacaaccttctaactcccttgcccctagaccaagtcccctattatatctgcttagtaggagtatcattaaacatccattcgggacaggtatgtccagcactgtctgggtccaagttcctcaaacccaagttacagggatataaatgatgctaatttgcaataagaaaggggtatggctgatcaatcttatgttcaggccaactgctttgaaccacagccagcctcgccccaggcggaagcacatgtcggttttcattctcatggcaaagcaataatttcccaaaacatagacgaatacgccctcatcaaccataccattgggttccatggccaggaagcatttagcaatatgcagaagtcatacaagagggtggccatgccaagccaagctgtgcaccagagcttgaagtgaggaaatattattattttccgtgatgaatatttatgctgatatatgagtttgtgtaggacacaaaagcataatggtcccaatagttgtgtgccccttcaattcagcagcctccccgcgaacgacaatacggcgcgagggcttttattaactaagagcccgctaccttctactcattgtaaaagaatcttccctgttaagtctaacttcttattaattaaccaatttgtggctagaaataatctagccctagaaaacatacttttaaatcttaagcgttacgatacagctttcctagagagcttctatcgatctgccttcgaagggttggacccggacacatgtgaagctattttgcatctatggatgagagctttgagcccaaaggccttggttgggatccaaaacacatatttgagggaactgacgtatcctggtttgtgcttccaaaaacccattacccttacccggactgaccattgaagatacacgagaggttctctgtcatatattgcgcggatgccctggagaggaaatcccttttaaacggcttctagagatactacgcttagttagtatcgaaagtaaaaaaagagtagaggttaaaatgcatttactcctatataagattgaaatttagacagagttatactagtaaccattttacggcgctcgcttgatagttacgttttactgagagatcctgtatatttgtatctcaccatgtatagctgaatgggtgctacctatcagtgacggttttgacaaaatgaatcgtggccgtatacattaagattatattcagaaatatgtagtttcaaatgttgacgaggatattggcgcaattccaccattctgttatatacctggggatcttataaagtagaccaaagcaagacaaaaacagctacgtgtatttttgttatccattaaccatactctctccttccacagaaatctcgtaagaacgtagcttcatccatatcactattgatcaaaaatggtcgatagcttccgtaatcacagtagaccacggtttcgctcgtaggacctacacttccgacgagaaacagtcacatgcttgtaccgccaaatgtgcagtttttgaaggtatacgtcgtctagggcttgcaatcgacagcctttctcttttcgcgatagccgataatgtctggtgcaagtcaatatccaagccacatatatagaatgcgcgtcatgggtacctaggtgtctcaattcgttggaaccggaaagcagatagggtttcgtgctgtgcgaggtgcaggtcacgcgtaatgaattagccacagattatttggagatggaagggctctcgctgggaccttatgtacctggctcgcaaaattcctcttgatatcgaaattggcatagggttaacctggaatgggccttgtatattgattagcaaaaaagtgcaacaggagtctttaggaaacagttctaagcacgagggtatcataccgtagcaatcttctctggatatgactagatacttcaccatcgaggcattgcctggattggggttgacttgtgattttgcattctgaggcccgccttatagccatttaatggtcatgctgaaagtaggtgagactgaatagagaaaagtcagaagtgcttaggaaacagggctcgttgaactgatcactaggcaaatgggatgatgaagagagaacagaatgtgatggggaatgtatcgactcacggccatgggtaaatttcccctggtaataatgcttaggtatggcttcgtaatttatatgcttaaaattcgataataacgctccgtgggtccctgtatgaaagtgtctaccattcacaaacgcaccatgcaactagatgcggaacgggctgtaaaattgctgcgtgggccctggtaatgaggttcaaccattgaaaaagacctgctcatgcaaccgacaactaggccaaggttcagcccaaggtgctgaggccagttgcggctacctcggaccacctctttcagacaagatcaaacttagtcctacgctacctccgaatagaaattctcgcataacgctagcccaccttcatatttttaatagcatgggtctatcctattttcctccccggcaatgccgaaccatcatctttgttcttacacgctatcaacaccatgcatggttgagaatcccttgaagcagaagcagctctttcactaatatacttgaagtgcgggcgtcccgttaaaggagcctccactccggatcaacataagcactcgagatctattctattttaagcatatgagttacaccagctcgccgcaatatccttcggggtctcctgtgggaatggtcgacagatattttgagactggatctaaaaacaacatcgtcgacgaaggacctcctccagcaccacttgcgctctctacgtattccacacccccgcttcctcccaaataccgcacgatcaagcctcgattcagtgatagcggcttaatgcccaaaccccccgatgacacattagaagttaagcctcggagacatcgaaggagtagaacgcgccggaatcgccaacggcagcaataagagaaaattggagagcctaatccagtccaacccgaggcggaagccagcatggtctcttttactagacccaggagcgagaggtttgaactgccaaatcatctgaaactgccatagatcctaaggctaactcaacgactataaaatttcagttttgtacccgtcacccaatatacggattccgacctgttctcgaggagtcaaggaccttctctcgcaccttttttattctcacattagaacgatcttacaagcccggcggaaattcgatcgcctttattccctaatattgcttccgcagctcttgtcgtcgaccgtccagcctatcaccatgatgtgcccagctcccttgattcgtcggacattcaggtttcaaggccgaattccttctttgagctaagccaggatcgagattctatgagagcagcttctcttcaattctcggagtatcttgaaaagaccaaagttctgcaatcgttgagcattttacaggattatatggcgaagtatccttcggtctttgaaaaacaagcccctgagatggtccagaaatggatgttggacattgaaggcgttaaaccaccagggtctttgtccgaatgaacaaaaaagcggaaacattgatgttctcgtcctaggttgcatgaaagatatataatttaacaagttgctcttagaggccctaagatgccaccttcgtacgttcataagtgagacaataaaaaatttgctttgcctttgtaccaatcccagcaggataagttccctgcatgaatgcagattaccaaatattttgcccttttaggctgaatgaagatgactgtatatgaaacatgtcgatgagccttaggtggtcataattatctccatagccaaaaacaacggaataacgatagtgaatgaaaggagaaatgacatcctgcattaaaaacccgttcattttatatccggggggcatacgcaatattaaagaaactagtgaggcctggctgatgctactgcagcatcatcacagccaagctagcacttatcttttgtagcagtgttcagacctatccctgaagcaaagctgaaggctcgtggcccgacaatcagggtcagccgcatgacacgtctgaaattttcattctagcacactgcatggcaggggctatgttcccaggaatgaacatctagacccaaagccactgtaggctgccgtcatagaaagtctcaaccaataacttcgttgtgaccaatccagaatattacgtgtcccaagggggctagttcaacctgacctggtatcgatcatcacaataagacatccagggtggataggccttttctaatcaatagtggaagttttatataaaatccactctaatggttctaccacatcatgaattgcagttaaagacatttgttatcctagcctaatcattactttgaggcaatatcgaatctctggtatggcttcttgttttgctgaacaacaggattcgaagagtgcgagctaaatttcctcaggacggatattcacttcaaatccttcttcaaggacggctaaaacaagtttcattccaggcttggctcctgggaactatcgaaaacccaaccttggtaccaaatgggttcacgctcgctgtcttccgaatttcaaggtgagttgacgactaaggattttgaccaaattttcatacttatcatcgaagcacaatacgcaaggattgtagaatgtgagagaaagtgccagtggcttgagcaaagccgagccccatccacagtacacctgcctagtgaccgatggtggggccttatcaccctacacttgagtttgcttcacgagcatgaacaattcttcgtcatgtgccagcatccatccgtcagcctggatgtcaagaatgttcctaaaaaatatgagatgtctgatcgtatgtggcggtatgggatctattcgttgttgaatatcctacgacaaagcctcccagggtctttgaagtacatgctctgcttcatcgaaacggtctcttcgattctgaaacggttgattctgtcgaattcagagcttggggactcgttgttcgaacaactgggcgatgtggctcgatatggtatgtttgcggagaagttgaatagggaatattggaacgttatatcgcggtgttggtaccaaaaggctgcggaccgaaatcccgatagcggacgaatccaacatcatcttggggtcttgtcacaacctgatccgcttcagacactctttttccttaccaaagctctcatcagtgcgcagccatttccaggcagccgggtgaccgttggccgtttcttcaatgactggcccaatttggcacttcaagaaaattccatggccacctactttatcgccgcacattacgtgctacttcgtggcgactccactgggcggtttatgacttttataaatggattcttgtcgctcttaccatcgtacatggaacaccatggtcaccaaagacaacacacagtgtacgtcatgtcctgcaatttcgcctctgtattcggttaccacaatcctgcattcatggctgtgggatcttcccaaagccagagtggacatacttcccagacaaatgaatcgggtccagccaaccagaagcaagcatgtgtaagcaattgttcgatcaaccaacctgcatatccaactaaacaagccctacagggagtccatcttacttttcggacactctcggtccttcttcagtatagtaacggtcacaactcagtcccagcaatccatgtctctctagcctttctctggggcctcacctgtcatcaccctttcatggagagtttggaggcgagggttccttggagagcaatcactagattcctcaatagtctgatcacacccaacgatgattttccgaagatcgaagacgcgtcgttcccagctgcagacgatggagcagctctacagcttccagaagatttcttgatacggggccaaacttggagtcaattatattacccaaaggggtttttcaatggatcaggcgacagtatttcgattgaagtggacagtgaggtgaagataagaagatacaggtgcctctggctaggtgtgcaattagcaatggtaggttttcatgacttgaattgtatctacttcacggccacggacgaaatggtgctaatgaattatatagtccggtccttggatctcttacattcctacaaagggattcaattgcacttgctagtaaatatgttagcagacagtcatagctattacagagcaccctgaagctgagataaaggcaaactaattgggatgaccccacgttgcccttcattcccgccggaggacatttaggaaaccactataaatggcccattgttcgaagacaaattgagtttttatcgttctccccgttgtactatgatagatagtagattttagaggaagacagccttgcatatagcgtgtatatgagataacactcgccgagcatagataaaaatgtgatagagatagaaaactcgggaatttgtagcatcttagtcggcgggtttcttattatttacgcaagcataatacctgtctttccttgccaattacatactaaaggtatttcgtcggacaatattaactcaacgcagccgattgctacgcactgaagactggtcacggttagatcagaagggatccgggtccactggccttacactcctcatgtttcaacgtcaagatctgtctctcaattgtattgttaccaaacaggccttactgcaggtcctttagtatatcgaagaatggtgccagtagagctctgaatagatgtgtaccaagctattggtctatagtatgaaagaatcatgccgaacaatgacaaagtaacagcgcaatactccaacagataaccatacgaacagctgaatttctcatctcgtaacaggtgttggcacatggagcactggataagatcgcacggatacaagactaaagttcgggcgctttatatggaaggctcagaacagggacggttccatgcgtcaaagtaaataccagatatacaagaccgcatcgcctttgatcacgtgccattctggaaaccctaataatcggctcaaatttctttgaaagtccgccagcttgagtggtactatctaaagtcagccaaagttgagtatttcatgcgaaattatgtttccatgatatattccctgaaagcataaatgagcagcgcagttgtatctgacgctcaggggttattacttaaaagtagccctttcctgtgacattcctacatatccaaatgtcagacaaatagatcacacaggcgcgtaacttctttcaatcccctttcgcaggatcctcacaatcaccgagacttgctctacaataacccaaagcttggcgtgccatgaatttgtagcacgctcagtgactgagatttcaaatccgacatcatgcaaaccaggctatgtccaatttcattggggtcttgccaccaaattagaggatcctgggccattttggtaggcgagaaagtataaggtgcagacagcacatgcggctatttatgaagtggctcacccgtacgatggtaatacatttgctgcgccaaggatgggagcggagggccttggtaccgttcggcaccgcctccctgcaacatgtgaagcggatagtgaagaagacaggttgggctgctcaggaaggacgctgagactgatattggaacaattgcttcgggcctcatgtcaggatacgcgggaccactagtatggggtgtgaacaaaccgcctgtgtgagcgcttcctgacacaccgctagtttaagaagccccggattgggaattgggcctgcagaaatgggatggtctggtgtttgcaacttgggagttgggcaggcaatttgggtccgggttttgtatgtaagtgagctgggagttgtttttgggtgggatatcgacgtctcgcttttgagactgcgatgtgttctgcaaatctgtgcgcattcccagttgtgcaatgttggcatctgaaacatcaaattggcagtgaccgctggttctcagcttcttctgatgttccggctgaccgctttgagttatttgagaacctgccagttcgtgctcaggggtaagctgattggggtgcccttttcacctgcaagtgcaaatgaaagcagtcagcgtgggaagcaaagaaaaaaaaaagaaaaaaaaaagtggctgaaaaaggtcaggtaacacatagatctgattatcttgaaagaggctagtgactatggcggacactgcattagaggtgagcttactctggaacccttctttctgtgacacattttagccatctctcctctgcccgacacacttttcttttgatactcgctggcctccttgcctattaggtagagcgtctcgcttattggtctccggctgagcagttgaatttagatcagcaggataaacgttcctaccattgattgctatgaacctggatgcaggttttagcatgatttcaactcggtggcgccgatttcccaacgtgggggtatctttggcgctatcgggtgtccaatataccatctgtccggaagcggattcaggggcaacggcagccggtgaactttgatctactgtttcgtcgctcttatgtaacggtggagccatatcgcgagaaaatctgtctatattacctaggatctatggctaagtaaggtgtcgcgatctagatcgctctagcagtagaggcttaagtgtagtattcttattactcagtactgctgcagtatgcgatgaatgtaagctaggagtgtcggacccaatgatggcgttgggtgatcgtaataccggcatagtattaagaacgggagtaagcggagttagtcgacctagagtgggggctgaggttacatccttatggcaagaatctgcctttctctttctataacaagctgtaacgatagcagaagatgatcgatagtggccaaagtctcttagaaactcaacttcaagtctctcctttggtaggtttttccgtttcatgtgccaccctagtaaacggttcaggtccttatggttccaattgggatgagaacgcgccgcctgtgatttagacttctcatggagacatcttataatcaattcttcgtcaatgaaagcactttcagaggcatcaatggttggctcatccattccgcagttttgagggtaatgcttagtagagttaccagtggagcttagtttaggaacttggaagggcattagtgacctgggcacactttctatatggctttcattattgaaacccacattttctgaacctctagttaatgaattttcgcgtgataaagattacagagaaagcgtctctaatgattggttgctatataccgtgtctacctactctatatacattgtactggtctcagtgtaacaggaaagcgtttagcctagctatttgagtgtaatattgtcttcagggggatgccggattagagattagataggctctgatatccgagggggttctaagggagagcttcgtggcaagcaagtatcacctatctttgatattgcggcgaagacattggttggattactattccttagctaacttttgcctaccaggtctgagaaacctggataggctttaggcgattcttccgcctagcggcttcctcgaactagcgacttattttaacttatacctaactaaggttcatgctcctaaggggcgcgctggtaacttaacatttgattcacagtatcctattcaggtactgtatgtagatcgctggtttctgttttagggtcaaccggttgaacaccatgaaggccgtaagaatctccatcctcgcagtcttcagaattcagatatggaagcaggttcggggctaaacgcaaaatgtgaacctcgaagttcgaccttgagattatttgttgggtggaatccactgatctagaggcttgaaccgctggtggggaggagtgtggtgtcgaagatacaggtcctttgcgcaaagtcttcttattgtgcttcctaaaaggacttttaccagttaggaaatatactcttaccttaatagtatggaaagtccttttttgtttgaatgttctgtgaaagttgtgtgtaatctctttatacgactgattcttctgtacttggtcttcgaaccatagaggaagctgctttaatacttctgtaggccaagccttgtttttgagaactagtacatccaaattattagtacatttcttcaacctcttcagtctcaatgccacgtttcttatgtgtattactcacagttccgggttccagcaccgcgttttgaagtactagcttacgtgtctatcctttaagtttcgatagccattctatccagcggatcaacgttaatctatactggcgtagttattactagctcttcggctaatcctaggggaaagggcgagcctaccgatctttgaccttactctagattgcggcgaagaaatcgatcccttcttagtatctcctcaagtacagtgttattagctttaataactgcgaggtgacgtaagcgagtgaatagggtaaatataatgtttgagtgggcttaccgtccgatgcaagttggttcacctgtgataccatttcggctgccagcgccaaggtatttagttctatttgtacgtccctttcgtaggaccatggttaaatcagcttttgaggtaaccctaaaaggattatattgtattagaaagcagacaactggacaatcacgccccggtcttatatatagaaatagtaaattccattccctttatattcagccttataatttctttccttaataacattaagccagttaatattggcactggcttcgtcgttatggagctgaagtacacaagacttcggtgctttaaatattacttctattatcttcactagggcgtcgcttataaggggaacattcaagaacccagtaaagctctctcgccccgctaggggccctgaaatgtgaccgagaatgctgaaggaccaaagacagcttatcttgaaaaggcttaaaatgctcagaatacacacttttcatttctagcagacagttcagtatacagttatcttccctaatattatggccagagcctttaatagtgacagcgttagtaaccatctggaatgtgactcgatctgagtaaaatcagttggaaacctgtgggcacatagagtaagaacaaattgccgaagactgccgtgtaatcgaggacacacgtagcaatgtgacgacgtttcatgaaaaggagattgtgatgtccggatgctacgcagaggccccgacagcgctagttataaatccatttgttgacatcacgtgtgtggacacttagataatttatcatctgcccagtagagtatatattaccactatattaattggggggcggtttttttttattttttcttcccctccgctccgtggatcgtgttcaaacaacaataatgggtggtaggtcatattcctgcgtgtctaacatgatgccttggccggagtaaagtacacttttagtgggaagctcgaatcccgaatctgacccgtttgaagcgggatacactaatcgtacctgcgtccaaatggttatcaaagtagaattttagtgcgggtggttttcttgcattatctcgcatccaattcagagaaaggagatgggagttactgattgagcggggatccgagaataggtctccggccccacctcccgttttgctttctgttcagactagaacggaataaaatacagagtctagccaatgagactaccgccgccaagtgcggttgggaaatctgggtttttacacggatgcggctagtgatgggcgcgttaggtacagacgtcgtagatcaaaacacgtcattactcccaccgttcatgctcgtgagacttaaaaggccgtgcattgatcaccagagccggataatcccgcaatcctctcagtgttgactccgctttgaaatcgtaaatcaagcccgcctgagacagaaggtcaataataacccgaatatacccatgatataacagccatattgtgtggaacctcattgtttgtactcacatgagcgtctggataatttttggttgtgttcaacacgagaggatcattattctgctaatagccatatttgagatttggttgactaaaaatgatagcaaatgttgccgtttgatcaccccgtatatttttgttacgaattttgaagaatagttgcgtaccgcagatttcaagggttaatgaaagctgttcacagtaatcctacacgtaccaggcaaaggcccgtctttttctttgctggcagctggttcgtctaatgcgcagaatgttcctgatttggggtttgtctgtgattagggaaagagtgcttgcgttgaacaaatggtggaatcaccaagcctgatgaccagcataatccgattaatcatcgataactagttcagattttggccgctcttcttgaccactcctcttaaccactcctcttgaccactcttcttaaccactcctcttgaccactcttcttaaccactcttcctaaccactcttcttaaccactcttcttaaccactcttcttaaccactcttcttaaccacccttttcttaaccacccttttcttaaccactttttggtagaatcaagatcgcactctgtctaccaaatgtaattactgctttgaggtgactcagcatgcaccacaccacacctcatggggacatatcctacttcagagttcttttctgtacaagtacagtggaagaatttttaactcttccgatgcattgaaataaaactaaaccaaagcgcgtattggtggacagggttggctacgtcaatattgagtgataaacaattatctaggaacattgattcggttgaaatcacactttttacgtctaaaatgtcaaaaactcgtcttgtgggtgcatagagtaaagctcaagatgagattctatgcgcaaaccaagaaaataagatagtaaataagttctgtgcatgtcttagcttcctcgatatcgacgtatgatgatcgagtattggtccctggcaccacggagaggtgctgcacgccgccagagggagcacaaactttacctcacggggctcagggcaatgagggagcacaaaatttacctcacggggctcatggcaatgagggagcacaaaatttacctcacggggctcagggcaatgagggagcacaaaatttacctcacggggctcatggcagtgagggagcacaaaatttacctcacggggctcatggcagtgagggagggcaggaagcctgctcctactctccaaagtgggcgcgtagggcttttttatccgttcccactacgagactcgataagtaccattaacgcaaccccagcctcgtgggaatgctatagtatggacgcgcagtgaagatgatgatgtactcaaagttatgaggtaaatgatttcacagtggtcagccaagttcgtgatgggtggatcccagaccgataggtatccactgactaaaagtcgggcatgtgaatcaaacgttagactgccctcataaacatcttcgatggcctaagatgacctgttcaaatggttatctcgaagtcaacttgctacaacaattgcgtgttttgttgaattacctagtatattaatggcgtattgccccgattccccgatgcaacgatttctgggcgtgtgttgattcttcctttacctaagctggctaatgcaaacaaaataaggaacggcccatgaggatttatcctgtactgccctttacgtttccaattttcattgttatctgtttttgattttttttttttttttttttttttttttttttctttttttcttttttgccgcgccggggcccctttagtgcctgcagtagtgcgaatccaccacgcgcacgaaatggcgcattcttccacccacgttcctctctttccccgacctcctcctcgttctccctattctgaagtttcctggattttgtcacgttttttcaatgtcgtacgcccaaattctacgatccagtcgtcaaccaggtggttacgaagcacaaatcgcaagcttgatgcctccagaggaagagcaacaacaaacaagaataacaccgtttcacctcaaaggaaatcctgatctaggatcccgtgccaagtatgagaaaggtaccatcatttgtggtcaaggcccacgcacaggatgaatggtggctgaattgaagttcacagcagcacagcaatcttcgcggtcaacccagcaaaaccaagagtgagctcctaccgtacattacagtggctggccttttgtgctgactttgagattgacagccttcataagcgagtcaagtgagttccacagccttcttagtagtttggcagatccctactgcggtaccttgctggagtcggagcctgctttccaagtgagcaaatcaacatgctaaccagacttataggaaaatcgaacactttatcaatggcattactcagaatggctttgccgacgtattgaccgaaaacgcgacattactgagcgaaaccacagctctcaaagacaagatccaagaattagaggaaacactggagaacatgcaagctcgtgtagatgaattgtgcaaggaaaggcaggtttctaccgtccagaacaacccagcacgcaagaaacgggcaatgccacaatgaccttgctcattggctctctattagaaaggcgctgctctcacctccacttatgatttatattcaagatagctctttgaatatattgttctgtgaaatttccgggacagttggcaacactgtcgccagccaagacgaaaatgctgccaccactggtgaaatgtaaagaattatttttttaaagtacttttctaaagtaggcattgattattaccagttcatgtctgatcttcagtcattttattcggcgaggaggcacacggacagtggggctctgccaatgtgaaccatggagctgcttgtgccctgtgcgcggcggttgctgatacttgagttaacatcattatcgtcgtaacacaatgccgtgactagcaaatatgtctaggttcaggtatttgggacaacatgggaatcacgctacgttttcttcggcggccaatatagatcgatctcaaacaggacgaccgatgaaaagccagatacccagtgtcaatattagttatatatacagagataccttggaacatgcaaggtggatgatagagccatctccattgagttgtacatagaagtggtaaacattgagaatcataagatctcagcattccgtaacgctcttatagcagctgccatacggtgtacaaacttccagtagtacgaaatatatcgcgagggtacagacctcagagtgtgtggcggtcggatcgtataacctatcgaatcattagccgtcctgacccatcgccaaggctgccgctatatcttacctggtagtctctcgtttgcattatccgagtcattcgttaggtagcggcgttctgaaacagccagctgctctaacgcatagatcaaaaggcgagtttttgtgtaggagcctctaggtacatagattggaagcgacggcaagcaggacatccgagcttcttcgcgttagactcgtaacgaaactgcccccgagctggtggtcttaaatagacttttctggatagagcgatattcccgtaataggtagttttgtttgcaccttaatacctcgcccgttcgtttcacgccgaactgcctaaggtatgccctagacctttccttccaagacatccttcggtgccgatgcaaccaggaaaggaggttccttttctcccataaagtccaggcgaccttatttgttttagacatcctggttctaggcatttttatgacaggtaagccacagaattaggatggtagtgaaaggcgagatggtgcaaagatcggatgcagtaaaaattgtgaaggaagtcggttgaacttgggggtgtcacacgtttatctaggacgggaaagttctaaagcggtcttgattaattgcggtcttctgttacagctatgagtgcgggcttgctcgacaagaccctagtcgaatagttctccaccagatgcatcctgaccctggtcgatctttggcctctgtgtagattccgagggagaatagtgactgcgaatgaggaaagtgttgtatgatgctgttaccaggttgttcataggctgttctatttggcggaagaggcctgcagttttgtgaggtcaaagtggtcgtttgtcagtacactacaccggttgagaaacggtcgatatccgaggttatctgccgccttcgggataattattacgcccagtcatactacggttaatggtaaaatataaataaacgtaataaacggtggtatatagttaaacagacgcaaaacaaaaatggatatgaatataataataaaataaaacgataaaatttaaatccggtggggcgtggcacttggggaaaggatagccatattcaacggccatgtcacctgctaaacttaccgtttctcttttcttttttttttttttttttccctagaggtacattcggagcttgacatttgtgagtggaaatggatgaaattactcaaaccttattaatttgtaatatagggagatactgagttcaggtcctcattgctaggcttgtttgggtacggtcacttttcacttcgaatctttaagggatcaaattctcccttttcctaccaccctccattctttatttcacagtttctccccgaaccccctgcttgactccaagacagttgcaataggtgaccagagaaattcgcagcggtatgtagaccgaatgtctcaattgctttcatcgggctcaccggagccaaacaatatttggagcccccccacgtcaatcgccggctctgtagacaatgattgccattcccaacagactaatgaatccgacgacgatagcaaggctaccttcatggatagatacagtgataaggagggaactcagggacatcaggccaaggaacagacaaaggaacgggtcttgggtagagccagatccgtaaagtttttgaatcctaagtattccgcagagtcaattgtgaaaatgatcgaatatgtggcagagtgagtctgaatctgttgtcttatgagatatcgcatactaacggcttgattatagattagatgggcgggtacagtaggtttcccttggagacaggaccagaatcccaacactgacacacttcagatctaatacaaagtcgctcaagggccaggaccggtagaaccagggaatgcagcgaaagtatatagatataattggttctataaacacgttaactaaagaagtggctacattgagaaaacaagtggacgttttatcgagcagagatgcagtcaaaactcgagaggccgtaggctcgaagcgtcaaaagcagtaagacaataccactatattccatagagacctaaaacgaattatcaagaactttgttttcacgtaaaataatcctttggccttctcctagcggttacagaggtcatatatcgccttcgatcaagttccgcgccagaaccgcaatttatgacgtaccatgataacaatttatcactgtaggtagggttcagtactgtagttgatcgctaataatcgcagacagataattatgaccgcgatgctcatttagacattgatggcgtggtctgtaggaaaggtctacgatttgttcggggaaagctcagtcgtacccggatcgaatcaacctgactcggttttcttggcgtatccaccgttccctgcagatccacgcacgaagggtaattttatcattttcatcaatcaagccaatcatgtcccggagccacaatgtcgcggggttctacggcaaatcagagcgcgtctgtcattaaattttttttaccccaaaactattaccacttactcccaatactccgccaaatttcgtcgcttattttcataggattgatccgcgcttccgtcaactccatttcgcttgcgctgcgatgagcatttggccgttgtggggtcttttgattaaatcaactcgaaggcggaccgcaggtcaatatgtaagtccaaaagggcctagctcttctcatgagaaaagcatacgattacaaaatagtctcggccattgattcgtcccaaccgtttattattacccgatcagcgttagccagaggatccgagctagcatcaaaattagccatagccatgcgtgccgaggtttccgcgctaggcaggggttgaattccaaatccattagcgcaatcaatagtataacccccgtatctcttgttcacagcccttaagactggaaggcgtgatggatgaagtcagtatatcagtggtagatccagaagatcatgtcacatggactgtgcgctatgcatgccatgggacgtaagaagctcacgtcccgtcccgacaagggccgggctgcggcccggtttcgatcgctttgttttttggcgcagtgaggaactagtccaaatgtggttagaaacaagtggttgaaaaaaaaataataaatagaataatacctaacccaggaagtattgacggagacatgcacgacgtaccaatatgcgtcaacccaatctttcaagtgtccttaattccccagtgccattctaatgtcacctcttatgtggaggataatccacgaacagcacccagggaactgaaggctacctggcctgatgaaatcagcggtgttcaatccagtctgaaccacggtcgcatgcagatcacccggcttatacgcaattggaaaagatacgtttagagtgcaaaaagcgttgcgatttgcccggggaaagctcaatgtgctccaccatactgcggatcgggccctggtttggtttccggagggttcccctgaatccgatggccaaaattgcgtcaattgttctatatcgggcagggacatactgagacggagtacattctgaaaatcctatttccttcaatcaactgagcaatttcaaattaccatattcatattattatcgcataacaggcggctatagtctcacctagtagcatccctcaatcgagataacctccacacaagctctccaacgtcccgccattggcttcaaaaggacgatttgcggatcttccaggtcggcgcaaagtgctgatcaatgaccggctctgatcggctcataaatctgcccaagcacaatggcagtagttcagcgagatcgtgacacttggactacgcgatgcctaatgccccgtgagccagacactagactcaacctagcttaagtcgaaaagcctaggccatcgggattacgtatgcacaatctgataaagtgtcagaataatcgcatagtcgccgttttacgaacttgtcgatacttcaaacgaagcactagtcaaaaataagtactatagacgagtgtattacggatgagggggaatttgattttcagcctaccgtcggactaacgtccaacaatgtcggctaatggcaggcatctctacggctttaaccacaagacatgaaaccgatcttccgcgctaatacatcctaattcggagggccaccataatctccgccgaagggccgttggccggatgagattaaatggagaattgtacaagcttgatctgcgcgacctaagggaagagagtgtgaccgtgcaatctccggtctggtgtattgaatactggactatacctgtctaggtggggtaatatatactacataggtcacggactacgtagatgataatatttgctgattcatgtcctctggctagatgaacaaccccgtaatgcctccatgatagtacacttcctctgcaaaccaactcaacttctagtatcttcaaaactgcggtatatattggctagctgtcgggagcggttggtggttggcttgtgttggcgcttgttgattggtcaacggaagtgaatagctttgaagcgagttggtaccaagcgaacccatctggccgttatacaccggccaggaaggttgtagcacatcagaagcagggaagccagcaaatgtaagcttgtttttctctgcggttttctctgcctctatcttcttctcgagctggctctgcgcatattgaaaattgccgctgacctccagtagtataggcagcagattatcaccggctgtgctaccaacctgtgcaacctcgagttgttgtttcagactggatatttggaactcaagtttatgaatcttggccagattctggtcattggtgtcactcagctggcgaatctttgccgtggcttgggttttgtccgcctctagtcgctgtattgattgtaagagctcatcccgctctctattagtgtccttaaaaccctgtaagcattgctaataaataatactccagtgcttttatttagaggccttcgctattagtaaggggctctagcttccacattcgggtgagtacttgctttcacgagatcagtaattaccggacgtactaagggtatatagagggatataccttgggtgtctgacggagggccaccatgaccggtggtaggacggcgtcgagtccgtttaggagcagtatctgactcggaactgccatgaccagcatcagctggggcttcggatgtcgtcctacgggaaggcatatcgagcgtcagcacgccgaaaggggtgtctttgcaagatggagtgagttcagcattgaccgttcgggtggacaacgttggctcttataggtctccggcgtacgcgccagtagccagaacattttggggttagtcccctgccgcttaatctgcgccgcaggattgcgaggttggcggatcggatgcccagtcattggtccatgacatgacaaccggcccgcaataatggttatcctgtaatttccacactatggttacattgagggtcggtggtcagccgttaaccatcacttaaccggtaggtttctcaacgatgaacttgcttcgtcgtctataattccgcagttaggttttgaacattgtcgggacggtgtactctttctatcagtaggtagcgctcattcacatccccaataaacattatcattgaaatcagatcccggtctcattcaaactgcccaagctttgccagaccatgcaatttcgccaagcacccgaccgccgctatccgtgtatgttagtgatctacctggtcttttcggttactctggacggtatactttggcccggagttcccgccgctaagtactcgaaaagctctatcagacagcgcgtatcgcgctgagcaggaactgataggtaagccaaatgttggttaatttccggtttactcactcctcccgatacatcaagcagtccatcaatgatcgccaatctacagtatggtacacgccgtaagatatttgcggcaacagtagtggatcatatgccgatctacgttcgtaaaaggtaggttttgggcgatctgtgaatataagagtctgattcgttggacctcgtaagctactccacattcgaatcagtcgcgactcaatagtgccgccactcaaccagatatcgagaatgtattgtgggttaacatagattcatccctgtcgcataatttccgttttcccgtgattagaaatcatataccggggtacgcgatttggctcagtctcgactgtgtggcacgcgttaagtctgtcacatgcggcactcgttctttctgttgtcgcaaaggccaaggttcccttgatctctaagctggctgtgtttactcgccgtcagccgagggtatgctatcagtttggcttgcatagcggtttctctgtgaaaatgtgaaaacgtgctacgagtcttgggttgacagtgtatactactccaatcttctttgccatttccgtcctagccggtacataggcatatcagggttggagagcacgaaaagtcttgctacggtcacaggcgggaggtatataaggcactgggtgatttcatcgttgcattgcacaatgtagacctcgggttctccccgccgtttcaaacttgggccggttaaccgtatatggtccaaaagagttcaaacggaccgttcaagatccgtaagatgtgagcccattgaaagtccaaggaaactctagttggggactgaatattgatatagagctatatatacaagcccaacctccgttgctcgagtaagcttcctagtgcttccgtcagacccgtctcctcgtgactccgatcaagacacaacttagtgcctgtctttattctgatagaatggattcctcggtaggcttactagacccctttcaagctccatctaactccataataggaatatcttcgactcctcgcgaggctcgacagtcgggcagtccgggcagaacgagcccagtccaaacttgaacaagaattgagcgcctccagggctgccgagaagcaagcgacagaggagctgggccatgtgtccagattagcggatattttctttgaactcagtcaaattctgggcggcgtggtagatcattggctgaaggagcgcggaaccaaagaacccggccaagagccggagtcaacaaagataatgcttgatgtgttgttgaaacagttggaagcacaggagttggccaatagcggtggaaattccgatgatgcctcggaaagcggtgacacaaaggcagcggcatagtgcagctaagtcatggctaaacgagagcttaccgtgcatcgttccttgttcgtgtacattggttattgcttgtgaaatgactgggtttgtttacggcttggtcgcgtgcagaaccgtcgtaagattcttttatctactttgctatggccgttcaaacggattcgtttctacatctgcccatatatgtgccgtcgtattcttagttcagattacaacacctctttccttgaagccgccagggttacatttcagtttgtactaattatggaaaccaacagattttctgtcgtgctcagaagctgacgcgagggcttcaacatgttctggaagacgacccttccaagtataccatcaccgaatcgctaccccggactcaatctgccgccagactgggaaatgcattcgaatgggaccgcattcgacgatcggcagctccatcgccagaattaatttctaagaaattccagaagtagaagatgcaaccagacagctctgagctcgatatgcaagtccaatatggatatctctctcacatcaatgctgaatcatatagcagagggctattgttgagatggtgaaggggctgctcctcaataagccagaatacatgctcgtcgttggtgggaggctgggacccgggacaaaaaggcaagataggggcagcagagtggggcgtgtcatggtttgttttcgttcgtagttggcggccctgctggaaaatagtaaggcattgtcagaccaaatggttataataaaaagttctgttgacgtaccggccgctaccattcatactgcgtggggagtgtgtttatcgaggattgttgtcgatttcttgtagcgtgtgaaagccggtgaccaaaaggtatacgctgactgtttgtgcctattatgtaggacatgctagtcggccagccgtgtgccggtaaaacagactgatggtacccatcttgctgagtttgagtagcttcctctgtttgactggcctgggcgtgtaaccggtccatccatctttgggcgcactttttaggtcgggaggtataacgcctgcattctgcgcatagcaaataccttgcggcctttgagagtcctattgtaggtaaatgactagtaggaagatcttagaatatcttgaggtatatcgctctatctatctgtgaatccttagatataagattttgataagggactctattatcttcagcctatcggtactttagatgatgagtgggatcgccaataatttggccgaggagtgattgaagattgccagagctccagtgcatattagtggagagtacagaaggatgacaccaaaggaaaggagatatctggtcagagaaaatgaggaatcttggtaaattttaagggatacattcttcatattaataaggtgctccagatggacagtgaaatctctcgtgaaccggacggtcaaagcgtctagatgaaggagaagagtcctaatgacctttggtttatcaccctacaatcgaagcttctatgttgcacatgacgaacgcttttcccttctcctaggaaagcaatacaggttcctaggaacacgagggtccctcaggacattccacggacttgtatgatagagatcaatgttacttaagcgcttttatagccaataggtgtcgcctttatcaacggctgaaggctgctaggttcctgggagcggaagtctggttcctggggtgcaagtatgggcttctaggactgcatgggctcccaggaatacccgtgtcgttccctgggagcacgcgtccggtttccaggaacacatattcaggctctaggagaccgagtgcttctgggagctcaaccgtctgccctgcaaagcaaagggcttctagattatcgccacccatatcactacacaacctcatgtataacagaggggtttactataaagactcaataaattcgtcgtggttcggtttcgaatcgccatcaccaccttgatacagattttaccccacatccacgtgccacactcaagatgtcagacccccaatggctttgggatcccttgagtatctgtgaaacggggcccattagggaaactaagacctgttgtggcattaccaagaaaggagatgcttgcaagctgatagtgaagaaagacaccctcaaggaaggtcgtcacaagttgaacaacctagcacgaggcccattcaatctttctactcttgactcccagctcagcgaccttgtatcattctttctctgcaaacagtggcatcgagagcgtcagcacaatgatgttaagcagcggtggttcgatgcagccgtgcgtaatcaggccgatgtacaagaatctccacgccagcgttttccacatattatcgcggaagaaatcgacggaccgcaacaggaaccagccagcactgccttggagacagatgggtttgctcccacatggggtgttgacgcggctttcccaaggcttccttccccgacatggctagaggtgactcggcctcctggtcgggatgttacaccgggcatgctcacaatgaatcgcgtgccctggaatgtttcacgggataacccagccattctgtccatccacaatgaatacggtggactgcactccctccagattcacaccgttcgccaagagtcctgtccagatggtgagaggtgcccaatttgcttcgagggagatagcgacgatctggtcatgttgcaatgcggtatatgtaagggggtggttcatttggggtgcatggagggctggctcgcccatcgtttaccgggaaacaacacctcttgcccaatacagtacgtaactcatcaccttctaatccccagggctgtttactaatacggacacagtcgatgtaatggatcgttccgcgctctcttacgctcgtcggctgttggaaatgctaccggcaactcgacagcagaaacacctctcgaagacacatatataccagtagaagagataagtatgctaacagcacctctatagcgtcggttaacccagactacccggcgtttagaccatcctcgagtcttctcaagctcatcccttatccgtcgatcacctcggtcgaggcgggttcccgaccgcttcctaccctaggtttatgttccgtatagacgaaagctagtttacgaatgcacgagatcaatgagtttcacaggatcagatttgtcgtagggctatgcgcaacgtgtttagcaccaatcctgagtaaagacaaacagttcatgtttagaaaggttttaggatgcattggaccccttagattttgcggggtagtctatgaacagacatggttggttccagggccggtttcaccgcggtgatcgtttttctgacgcagctttgaacgcttgacctaataaagctagacagccataaatataatagccacgctcggctcaataggtcagtgtcaagctagcactgcagcggggcaaacatgaacttacatcatggcctcattatattaatagtgattgtcgcaacgtctctgggtacaaattttcccactactcaatgttgacgccttgagccatactatcatattccttgcatactatcatattacttgcagaatgaatcccataaagcaccagccctctggacctaagcctatatggcgtgacggaacgcccgattaggccgctttggaaagaacatctcgtccttctgcgccatcttccaggccccagcccagtccagtgataattccctctactctgcctcttcctcatcctgcgcagcagaaaagccaaattgaagttaaggctattcagccagtcttcgaaaatccgtggttgacttacaaggcgatcgtagtaatctctcaaggatagtcagtctttctggcccgacacagaaaagataaagcaacactcgtcgatatccaccttttaaagcagcaattcttatccatcaagccattgctagaaacaatcaaccaaacgtcacaccccagctttctaggtctagtggggtgctattattaggaggagcaggtatttctggtctaggagccagtagagctctcggtaagtcacatcctcgcatcaagatacactatcactgagaatgaaattgctgcaattgttcggccggtatgtactactctcaatggttgacgcgggaaagcaaacggtgctcatgcccgataggttctcggaggaattcaatatctgcgcggtcacgggagagcactcgctgccttgagtgccgatactattctactcacggaacttggtggggtcaggatcggtgagtaaatatttgggcataactggcgggccacatgagcatgagattctgatagttgaccatgtcgcagcgggagtggagcatagttgccaaatcaatgcagccgagatggacgctgccactatgaagctgtttgccttagctgaggtggtggagaggctgatcatgaagaatccttcacaatatccatggagagccgagataaaaaatctgcctggagagctgaaaagatgcgattcaccggaaaagctgctacgcgtaagccttgacctcccagccctccgcgtcatgtactgaccaaacagagcaaattgttccagcaattgggggatgagggcgaactgaagatgctggtgaatgcggcaaacaagactgcttaccacaatctagagtcatacaagcgcatatgaacgtggtgacgcgaaaatgcggcgggaatccgtcctcttgccgtttggcaggtgagaagatataattgatggctttgtactgcagatggtacagaatttggaggcaatctgcagccccatttgaggagatagcttgcgggggcttttttgaaatacagctatatattatccatattacacacacacacacaattcattaacgcccggcggctgagccgaaagggcaactatcgctaaactactatacatgtcatagtatatacaattctgtgactcattggagcccatacacaagaccttggcgtatttgtcattctcagcatgcagtgtcgcagcggatgctcgtgggttagtaagttggttagtagactggcttgaaggcgcttctccaagtgttcaacatcctatcttcggcagttgaagcgcgtccaccgtgaatagcacgaggtggttggtgggttagattagaatgaaagaggggtgatttatgttcgtcggcggggttaagtggcctcgaggcggcctgtggctatggcgaatcgtattgaggcccgtactgcctctaagtttggcgtccacttttgatcgtcggaaggcgacttccctcccaggtaaaagggcagatttcctcggtgagtgtcggtacattgtagcatatccgtccggtgtgtggtccacttccgacatcgaaagaggaagtgctccacagtttccttagcttgtccgcacgcacactgatccgtgtcggccgcgttgattcgatagaggtatccattcagtctcgccatgcccgtccggagttgggctagcacggtcgcttccttccatgacaagggatcatacagctgtcgcgtgtgttttcctgggagtgctgcatctactcgtttggcgtgctttccgacgtccgctggcagggtatttctggggactgcttgagaccgtgcgagattcagcgtggttgattttatcctcggggcgcgttcttgcaagagggcatcttcttgtgtcgcggctctagcctgttctttagccagacctagcagcttgttgtcttcactggcagaaacccagcggacttgaacatggtttccgtttctctgcaaccttttaatcaacttgtatatccgacacacgaactcctggccagattgttgtcgagggttcctgagtgtgagaaccgccgctttgttgcttgtgagcagtgcgatcgtgtagtctttcagtcccgtcgccgtgctcaatacatgtgccatggctgccagttccgcagagaatggattctgctctgcccttacagccaaggtgatggatagcgctttgtgtttaagcttccgattccgaggtggtcgcttctcgatggccactccaaaacccaccagctcgtttcgtgcagagctgctaaccgcgacctgcatgcacccgcccgcttcggccagggactcatgctgctcatcaatgtcggtttgtacgcgttccgcccacggggatagcgtgaaggggttgatcgtttctaatgtctccatgtcgatgtgcttgagcgtatcggctacgtgatacagtggtgagcggtggtatcttctgaactttctgatctgatctgtacaccggcgaagaggattggtttccggcaaggtgtggatgtctgtccacattttcacggctcgtttccaaaatcgacgttgtgcagtagccatgtgagcctccgcctctgcgacactagtcgcgactgtgagaaatgtccccacaatggcttgcgcgcctactctttggactcggttgatcggccccatggctttatccttgcacgcgtgcatccagacattggaggcgtagtccactactggtgctactgtcgatgcgaatagctgtcgcgcggttgctggggagaggcctcggagtcgccgaagctccatcgctgcttcgagacccttggacgctgctctcgcgatatgctccttgtacttaagtctcgtgtccatcaagacacccaggatcttaacgtggtctttgggtaccaccgtctgccccttgatggtgaatggctcatggtccaatttacgcatcttgggagcaaagtgtatgatagccgtcttgtcagcctcaaatgtcgctccgcttctcttttcccagttgagtgcctcgttgatgatggcttcaattccttcccggttactctgcgcagtcggaccggtcacccacgcggtaaaatcatccacgaaagcgactgctcctccctggctgtcgatctgtctttgcacgaggtctgcattgaaaaacagaaatagaatcggagacaggggcgagccctgcggcagcccagcttgtggcaagctttgagtctcagataactgcccgttgatcaggatatttgccgttcgttccgagcagaaggccccaacccaacgaagcaagacctccggtatgcctcgggctttcatcctctggatcagtcgttctttgcatactccgttgtaggctcccttgacatcgaagctaatcaagctcagcactcgtcggccgcgccacgccgcatagatctgctcctgcaggaacaccagtgcttgctctgcggaccgctgctttcgagccccaaagtggctcccccggcggnnnnnnnnnnnnnnnnnnnnnnnnnnncgcgcccaaagggggctcgtcgggagcagtccatgcgtctccaccgcgtgcgagatcctctctgcgatcaccgattcgagtatctttccgagtgtcgcaaggagtgagataggtctccatgcctttgcaatggtgtagtcatctttattcggcttcttgagcggtatgatcttggcctgtctccactgtcttggcagtgtgccctcttgcagcgaggcttgaaagaggtcgaggaccctgtgcttgactgagggccacgtcatcttccaaacgatcgccggtaggccgtcttcaccaggtgccttccacgacttggccgctgacagttgccgctctatctcctccatagtgacggctggcatgtccacaggcgctctttgtggtctcactccttcctcgtcgatgttctctggcaaaggcgggaaaaacttggatatcaattcctccgcttgctccttgtgatcgttcgtagtggttccatcggctctgaggagctgcggaatcttcccgaacgcggcattgtctcccgacttgaggtacttggcggctttccagatgttgtcgttgtctgcgagaaactcgttccagtgcttcttcttttgtttgcgaatggcatcgtggtattgtttggccgcatcctgggccatcgtttcgagccgggggacttttcgccccgcccgtcgctcggagcgagcacggtttctccagtgcgtatatatatgacggagttgagtgaggtcagctgtccaccatcgcttcgcatgtggtgatggtttcgccctcggggttaaagcgtgtaccgcttcggacactgccaacatgagtcgatccgttttctgctgtaccgtgccctccgacggaaggatggctagagcgttctgaatcctggcgttaatctccttccatggtgcattcttcagtaaaagtcgctcttggtgctttgggcccgaccactgggcgtcgaacacggactcaatggcgcagtgatcagagccgtggtctgtctcgagtaaagcacattttgtcatggagtccgtcagattttctgaagctaggacgagatcgatggtagactcgcagtctccactttgtccgccgccgtgccatgtcttggtgccgcgtttaagcaagctactgagcgcaaactcattcataaggtcaatgatcggatccgcttccccttgtcttcccagcgacacctcgtctccaccccagagttgatcgtgtcggttgaagtcccctaccatcagaatctccaccacggcgcctgtctctcgtcgtacttttgtgatcgcatcgtgtaaatgattgcacgcatcgtccaaggctgagatattgcctccttcaacgtaaaccgatgccataaagatcagtcgctcggggagcctgaccatcgctgctgtgatgtctggagactccacagggacttgctccgcttcgacttctttgttgacccagagcatgctccgaatcgcccatctcccctccctccaggtagagggcaccatctttgtccacttgtgatgccccattggagtggtcaagagccggccttgaatcctcctcgcttggggttcctggatcgctagcgccaccgcgttttgagtgtcttcgtcattcattaaactctcgtgcactgcaccctgcttcctcacgttcagctgaattattcgaagagaattattcatgacgtgatggatagagcttccggcagttcttgctgtacgattcgtgaggccctccgcacggtacacactttggaaccggttggatacagtcgctgtggcgatggccctctgtagcgcatttcgcgcatttctgggcgttcttgcactggaatgccttatggcctatctcttggcagttgtaacattgtgtcggtcgcggtcggtgttcgaagacactagtcacaccagattctccccccgcgtggaaaaatccgtcggccaagagccttcgcgcgtcgatgcgtttggtcaggtaaaccaccattgaaccgtaggccttctcgctctcttttctgctcagccatgaaatcttggctacgttggtctcattctcctcactaaacgctgctgcagcctcggttcggacctcaccgctctcgtctagcacggaggtcttgttgacgctatcgactttgatcgggtagagctcgtcacggaggacccgagctcccgccccgattttctgttctgcaacctttttgaccagctgctgttcatcctcatcccggcaggcgatcctgatccggttggcgtttttcgggtcaacggtaacagcgcgacagcgccagtgcgcgtggccctctgttaactgtatctctgcctcaaccgctgctctgaccgagcctgcggaggtcgattttgtccctttttctgccatcttcgaggtatctatcgtgcaaaatagcgtgtccgtaaaggtggtgggtgtcgtgttcagcgttaaaagggaccgtatgttgcttgggtaactggacggcggagtgcgcgcgacatctgcgtaggaaggagagcctgcaacagcgggaacactgatttcctcgcgtaaggactggatttcgcgcaggatcgcatcgtggttgttctgagagcacgtctcagagtggcattgcggtgtcgtgtttctattcgtcagggactgtagctcgtgtcggacctccgcgagggcggtaccgaactgttctctggttctctgaatttcttccttgtgtatttcgtcacggagtctgatctctcgcctgagtttggcgatctctctcaccaaaccgccgacgtcgagctcttcgcgctcggtcgcggcgtcgtccgaagttacctcgtcacgccggtctcctagctcaattctctccttttgctgggaacgcgtctttcgtcgatcagtgtcaatttcctgctcacgagcgtagttgttcggtggtcgagtggtgcgtttcggtctcgccagtcgcggtggcgaatcttcgcgttcgtcacagtcgggcggttcaggggttcgcatcgcggcccgtcccgccattggtcacagtaactcactagacgcgctcgaaatcctgatgaaagtaccgagagacaagctacagtacttcccgaaactctttatactgtacgagctatacagtacgtctcgaaaccggtgcaaccacctacactcttcgattgtttctctaatcttgattaccaattcacgctagtacgcattagtagtttttccggagcaccactgcccatgggtattgtactgtttcttacgtagagtacctgccacaaaggtggggtgtattcgcttgtaatattaatatacacctcacacctccgtgccccaccatgaaatacgtaagaaacaacagatgccagttacagtgagacctccaaagtaattgcaccccttgacccacgcctcctgattacataatatactgccgtacaaaaactccataaattcaatggtacctagtacgatgtataccagccctcactttcaataatagcctgtacacgacggggcatagtatcagatagatgtttcaaatggtccagatctagcctcccccatgctatttgggccgtttccgcaaatattgcctttgtttcatcgttgtttctcatatctaatagatcaggtcgaatcttatagatttcggcctttagcaacgccggaggttctcaattggatttaaatcaggagagtaaggaggccattacataacctcaatacccatctcgcgtaaagcgtcccgaacaacgtacgcagtatacgttggggcattatcatgttgaaaaatgctaccctcattggcaagaagaatagggagattttcggtatataaatcccgaataacgaaacgatttacgcctccacgttcaggttctgggcctccgaatagtagaatcaagccggatcgtcgttgggcgccggagaatgcagcccaaaacatttggttaacttgtttccctttgtatggaagaccttggacttggtgaagccggcattggtcctttggtcgaataaaaaactattctcgacgaacgccaatcctacgttcaactgtacattcgtcggaccaaaagactcgggcccaaacctccagtgtaaagtgttcataccgacgggcccatcgaagacgctttgcagcttttccttcgttaagatcaggtcaccacatacatctccacttccgatggtgttcggtatttaagagtcgtcggattgacccttttttgactgtgtaagagatctcagcaagtagatcttcataggtaatctttggattctcaataataacgtcaaaggacggactttttcagttgaatccaggatagttggccgaacagagcgtggtttcgaaacaccggccgttctctctggttccttttttagtatatcgtatagtagacaatgggatttgcggataacgggtatgaatacgtttatacccctacccaatagtatgaagctcgcacatcctctcacggatagctggggtgagctcggaggagcgagctattaaaaaaaaggctttgtagataaatatctaacagtaatgagaataagaatagggattattgagagatctggggaagtaaaaacataactgtacgcgcgacgcgacctaggattagcgtatttactatggcggtgaagctaaaaatgataggcggtaagaagatggatctaggggggtgcaaatactgtattgccttccccaaccaaaaacgagccaaacccaccgttatgtcatccaatatccgacatgtgatgataatgcggggtcaactttcgtaggccagaatccgtcagctattcttcatcaccgatcacaaacgaagaacttggtttcgatattggtcgagaaagaatcgtactccaagattccaatgcagaacttaagctttgacaaagcttgtgcaatggagcttttgcagtgtacccaccccttttttgaggaaagaggtctttctaaacactcatgggccgaatgccctaatgctgcttactctggtcccctccttcgggtgtgggacaagttctctggcagtcacctagatcaatcaggaagaatgtaggctcgtttacctcgggagcggttgggctcacaagaaagtcgaaaagaatacctagccatatacgccgactttcaaaaatgggagccgataccatttatatcattttctgcgtcggtatcgggtttattaaggtttttgtcaaggcgaaaggggctaagcttccctagaacacttacggctataaatccggacgtttgtatcgcctatggtctaccaatggtcgaaatggaatcagaattgaaatattatgaagtgtaagacccatatcggagggcttattcatattacaaagatgaatatctttgtctttgggaggttacgcccgatgaggttgtggtacactgggactgggacgtccttattgaaaacgatcattggtacgaggacgagatactaccggcttttaaggagcataacgatctcttcttgcgcagaagtcggattaaagcgacgtttgatatgttaacacttgaaagtgctttgcccagtatgctccctggctcagtcgacagagacgtactatctgggtcggatctggaccattcgagccaatcggacccattatccaatgaggattggaatccctcgagcgagaaggaaaattggcaatacgaagacgattattgggacacggacgatgaagcagaggaatccaatgcaattgatgacgcatataagattctggaaggcgactggtgaaagaatatccttgcagaacaagaaatggcagatattaggttgctaggtgttatgccttaccttctagcctggccctcaatgaaacagcaggtctattaacatgattgtattagcttccgccatgtcagaacagagcgtcaagtagagagagctatggctgacaggctgagtataatgatgagcaggttcatgagtagtctgcaggtacagtacgcaagtaatgtaagccactacttgcaaggtctggcgccgagtaatacccccaacccgtcacttggacataggagtggcagagggaagtgtcaggttgctaggtcctcgaggcaatccctagatctagtttttgacatgtttgcatttccatagaaaattctagttcccttgggccgccaatgcaatgatgagacaaggcaccgtatttaatgtaagtcaaataatagtatcgagactgatacaggaatattaatgttccggggctattcctaatgtgttctagtgtctcttgggagtggggccagaaagagtgtctgagattattcttgttgcaccggtttcaggacgtactgtacaataacgaagtgattgttactaaacactgagacaaagtggttgaaaatagtcagacatgggcaaatcttaccccctttgctcgtagctgaacttggctttgtccgtaggaagagctgcccttgcatatcgattttccattttcagcaaatacaccatccaccgaaaatatctcaggagaaacagctttcatgtgatctaggagcagatatttgatggattcaccgcgcctgacgcatgactggatccatggcgacattccgtatcggtccatggtattgggattggcgcctcttgagagtagcaggctcaccaagtctctgttacctctaaagacggcaagccagagcactatttagccctcgcgatttggaagatcgatcttgacacgagggtgttgaaggagctggttcacaaccgcagatgactctttcgccacactataccacagagcactctcgccatctgcgtttctcctattcacgtgcaaatttttcttacgcaccaagagattggtaattagctccgagccatatttcgcggccgtcatgagaggagagaaaccatcgtgcagcgcattcacgtcggcctggtaagaaagcaaggtctttgcaaaggcgcgattggtgtttctagcggcccagtgaagcgcatgatctatagaatctctgttgggaagtcgagaatggaactctgcacgacattgtcaggattcggaaggctcctcttcatttcataccatgattttgggcgacggagttcagtggaaagggaaacaacgtgctgctcagatgatttttatcggttccaaggtgacggcaatagataggaatgaaagtgatgtaactaagttgttaagcatttttgaattaagagcctggcaagcgcgacatacgtggaaggggagaagcttaaataacactcgtggtcaccggccaagcatcagtttccccctacctgctgacgcaatcgactagcggtcctaggaacgctgtctaggtttctaggattgctgctcggttctacagagaccaaatccataggagacatgtaccttgcgatgctaggattgatattctatgatatttgtgtgggacgcagcttccaaataagccattgggtatccgaaattatttgtccgtccccgcttcgctgatagcctgcgtcaatggagcggacttgtctggggtaggggctcttatagtgcacatgtaggtggcgccagtaacaggaactaaacgcgatcaagcgtaatgattcagcatcggtcttcatctataggaacattacaagtatacatggtcacgcgtaattcctactggtggtttagtctgtcacgtgctctttctagccactttaggttaagcgcggtatgtgcccagcgaaatgccggtggtgattgcttcgagctgagtacaagagtacgcaactacgcccttggctgatggagctggatcctgctggtagtgcaatagtatttgtatggaggattaaatagtgttccgcgtacaaattcggttggcgtacaacaggtgcaactgctttgtgaagggtgagcacaggatatatataatgactggtatgatttgaggtttcaaccacgaacctagtgaacatggccttctatagcccaggatagcccttcgcgcttgctatctccagataatgtattataaggtcaatacctgtgtttctacacgtaacaacgcgtttttgcacgagcatagccgcgttgcgataggcgcaaagtgatatttcctaaaacgggggttcaatttcagacccacacaggagcccctattggctggagcgctagcgctcgcaaggtagcaccaccacgtgatcgctatgtcagtcaaaatacctcgtcgcgtatcggagccggtattcctagcgctatgctatctatgctatcacaatattcacgttgcctgcctccatgcagtatgcccccctcatgcgcttcgtactcctacaacacctgtatagctttagtgatccctccactgatataaaccaactcgtcttctagttgagtttctcgagatgaaatactatccaactcgtcctggagttgacgaatttttgcgtataatgtgcgattctcgccgagggactcctggagatagatgctggtgcggccaagctcgttctttatttcatgattggcgcattctaactcgcagatctttgctgtaaaagagccgtttccctcctcgtcactacgggctggcccagactatattcaaatttagcaccgcgttggcttcagacaactgccaagatctcaatgctcacctcttcctttggcagatggtcccgttccaattaggcaacctgtagcgtctgtagagtaactgcctcaagcgaccggcccaattcctcgcaaatggacctatataggcccacgcttccactgctcaagttcgtctgcaacaggcttttcttagattccgtcacggactaagcgtacttgtctccgactgatggctgtaggcggacatcgctgggagcgacgacaagaccaagtcaatcatctgacgattagttttgctcatgaggcagaggaagactatagcatacatatataggctgccaatgcctcacgacactgttatctgaagaaagcgcgcctttcattgcttgtgaggaccatgattgtatttgatctgttctgtcaaacaaggcttaaacccttgatatatgctcaggttaggcagtagagatcatatacctcgacgacttatcggctgaagacgatctgattgtcgctcaagcatcaaaaccccagtggggccaaccggttaccgatgaccacagttgaccgacccttggaaattgtcaactggctatgaatttctacgacaattgtattagcaataatcgtcagttttgtgatcataatctggagatttgatgttttcgaccatgagtcctaatccaacttctgccgcttgttggaccgggcagcctttccacccaaaccacgctgatgctgctcccgatgatcgatacgcagccacttttgtcttcggaatatgactgaaagtcgaggcggtctagtccaaaaatgttccaagaagtcgttcttcctatctcacgttagcgtgatcgagagcatataagaggggaatcgaacagaccatggatatccgaatctttgggaattggcctgggcttttatagacggattggacccaacgagcacccaccctttagtttaaacgggctatttatcaaccgttcaagtccgattttcgtcaaacctatccaactaagcgtttattatgtctcttggtcgttgtgtttttgcaccgtcagattgtttctccaaccatcaggtatccgcacctgggttcagagtaacttctaggcccttgactgtcagttagatagcgtagagggtaaaaagctacaggatggatcgaaatcagtttcaccacttgcacacggagattctttctcgaaccctctttcaaaacacgctatgcctattatagttactctatccctgaccccgtttcttggcagtattccaatacaattgtaaaaaatacacttggattcgaaattggcttccatattcaacaggcacagtatctcaaaccctgccactgggaccatggtgaaactacctggtcatttagctagcttacagaacttccttcgtgtcacttcaatactgtaaagtacctcacaaggcttatgcactacgtttcctgcatcatttgattaagtattctttctgccaattttgccttggccgcctaggcgccttcctagtaacccctaaaaggccaagacagatgcctataggagcaaaaatattctgccatttatttccgtcttctcggacacataaaccaccacctgttccccataggttctattctaccatcctcgcatcaatttcgacttgccatagtgcacggtacaataatacgacatggtgggaagacaagtatcaatgataaaacaagattacggtgaaatcggccaatcattaattgatgaaataacggatacattgcgtactcgcaacgcagcgtcgttactctacattgccgaacaaaaatgctttcagatcactggcttctctgaaacacagcgaggaaaatgcgttgaaatactctctggagtgcaatctagtgcttaccacttaagaatcaacgaagaaaccgaccaagacatcatacgttttcaactcatccctattttaagggagagtggccttgaccggacagcgtacgattttgctcgatccgggcaaaattttatccaagggcagcgcgactcccgaagccggaatgccatccgaacacgattggagagactgcgaaaagagcgacagctatcacctcgaaacctttgatcaccttcgtctcgtcatatctacaacaacaagggcgcaacctaccttacagcaatgtggctagcgctcacaaaaccataacggtagatatctcgcacggcgccggatgctccgaaaatataccccaactctcgcgcttgcaccgacgttatttgtggaaatccgccggacttttttacgctctccgtatgtgatcaaaagaaggcattttaattctacatatggcactgaatttctcgccgcggattcctccatgcaattagccattccgatcgaaagttttgggtttctcgtcttttgcgtacctcgccctcgctgttctatctcggctcattgaatgtatcagtgattgttaaataaggatcccttgtctcctctgtgtcatgccaattgaatgtattatattcaaatgaaatctaattcctggtgattgactagttctggcgtcttgccaatcgaaatgattggtaatatagatgatataagctaaattagatcacatgatcttagtaagcacatagaataaccgcgcgctcagagatagaataatggactgacagatgcatatactcgactggatatctattggtccaacttcaccgccctgattacgtgttccgacatgaacaccatagcacgtgataacgcctttcaatacgattcaatacttgagacggagctaagtcggaaatggattagtgtgtttcgcactagggttcgagatagattttatgagtgcaaagtggtgaaactaatttcgatccatcctgtaaaattggtttcgcactaaatcacaagatccaatttttcacatgactatgacactatgggacggcgagtgaactcggaagagcgtacaatacaatcaaagtccttgcgccgccatagtatgggccgtgctgccgactacaatcatcaacttcttgcgactattatgtgaggagcgacaggttatggatatgcgttgaatgtggcgagtgaatgtgacaaggaacactttatggtgaacgtaaggtcatggcggcgataaatagcatcgggagccccagccaaaagcatcacctctcgcattgcccaaaataatgcctctcatctctcgtcagccaacgcaccccgcgggagacgaacttgacactatgcccttacttgttcgccgccctaacacgcggccatcgcgaaagtctaagggtgccaacagcccagctcaatcaacattgcagcgagaccagcctacgcttagactgcggcttcagcagagatgcatgacgccggaggcgtggtggacgtctcttaccgcgtttggtgcacatgataatatttctaagcacatgctggaacacgagaaagccattgccacggaggaaattcgacaggaatggatgcgacgtctgcggcccatgccgcaccgacagaacccaccggcaaagaaaggaaagggacacaaaaggagctagcgctgctctatcatacagtacctggcggagaaacaatgttccaagggaacgagccttcaattactagagaactatattgtttattgtagatgtgaatggtaccatttcacgatatacaatatttgcttcaatatacagccatcaccttgaataaattagaaagattcaaattgctctgtggggatgacataaccagtcaaaagtaagcctacagatctagctcaaccaatggacgtctctgtatgctatcccaaacgagcgatatcgagatgtagcagtgtgaagaagcaatagagatcaaatgctgcatatttctcataatgaaggaataagaaaaatgccgtcgctataggtatatggaggagttactggtgggaagacgccgacgctgatgcccactaacaccatatgaaggcgatatccctgacggcaccaaataacgtcactgcacacgaagcggtttaatatcagcggttaggtattcaaatgtaggtctataccagcaaatttgtatggtagctatagggagtgaatgttggaagtcggtcgaatgcaagtaactaagggtctgttacccagtactactgccacggtgaccttggtctagccatgctccaccatgggcagccgagtgagaagacctatagtataaagagagactttcccaacagcggaatgaacgtatttgccaacacgatcagtcatagagagccccagcaaaacatcagaagtcacaggtacacaggtagaggcaccgctctacacacagccaagtccaaccgaggagcccccacttcctggtattccaaccccgccgccggtaagaatagaatatgaatagaccggaccacgctgaccagccagacacaaaaccacgatatagagaggcagactttgactatagagcccttccgacctatacttaaggtcttaaagtaaattaaagaagaagatactaaacttatacttcgtgctatacatctggtagggtacattcgatatctgtgggagtcttatatttctaaatatacagacatccagcagctcgaagaagaaaatgagaagctgcggactgggaatattcagctgtgcaacgaggggaaccgtttgaagcactgccaagatgagcaagtagcccgcttgcatgctatcgatgatgcgttggatgaagttcggggaaggcttatcggtgtgctcaaagtttggaacgagcggtctgtcggcgatttggccattttgccagaagatggatttccccgatgttagtcgttgctgtcgaacaggtcaaatttacttcaaagctttgcaccgccgcaaggcttcaagcaagtgttcgatgatatcaagcatttgctagtcctccttataaatcccttgaatctgtgtgcctaaacttcgcggactaccaccgttgctgaacaagttgattgttcatcgactgaacttccagcacttcgaacagagtaatatgacaagatcatccagatggttagaatacataattgcagctgtcaaagtcagccaagagtggtatttctttgtacgcgaccaaatttacctctagaaataatagccagtagtataggacaactctaaagaccgcaatcagaagaagcacacctgccaaccctattgcccaatacaaagcacaacgtagttataacccagtccgggaaccggccgttatatacttatccagtgaccacaagagataggccaagctcagataatctacaaagtgaagaaagagtacggtatattgcagtgggaggtagacataaatactaaccagtgtggctgtaatcttgatcaagattgaggaaaggaaaaatagtgaaaaatagatcaccaatcgagatagcgtaccggtaaggcttcgcagcaggatgctcattcggagagactgatttttggtggttaaattaggatcgagcaataatatttcagacgcacgtactacgagtaagaacggaaagacactggatatcctaagtattccctctcacacagcctcacttatttcggcccagctcagtcccacataaactaccagtagaacatctttcggtacagataccgcaaggttaagggctagatataaaattccctgggctgctcgacgagacaattctaaacggataaggctggcaattagcagcacggtagctagggctatatggaacttaggcgaaacctgcatgactggccgccgttctcgcaacgtgcaagtgtactgggactgggttgaacttatacgcaggattacgtgctactggattacttgtgatatcatgaactggggctcaataatcatgccttacgatctataatggtcgcatataagttgataccaccgagcctccttctaggagccgaatgaatgtccctaggaacgggacgggtgttcctaggagcccagaaccccccgggaacacatacttggatcccgggaaccagctttctactcccaggcaccgagcaactttagcgcccataaatatagacacctattgattaaaaatgtgcccaacaagctaagtactctgggagcgagagtgactctcctaggagcgaactgcagtgcttaccacacgcattaaaactttctgaaagctcttataagataccttggtccccactgtgttaatagacagacacacttcctacaccgttcaatccttcaaattaacttattatctcatcttcggtaagagcttcatagcttgagccaaacgacaatatactgaacttctttccaaaatcaacagctcactgcgttcgcataatctgtcgagatatcttagtgttagaaaggaatttcgttattatttcgtcacgaaggctactacgagatagcatgtagcataatggaacagctgacggctttggatattggcgctctcttagcttcacttcggattacgctagcctagcatatagtagagacgttcctacagctactacaagactttgaccctacgatacgacagtttgagtcttggttctaggataaatgccagatactgatcatcggcccagacactattcgattgagcgaccgaatctttaatgcagacgagtactataaagggaagcgcctaagttaaacccagctggaggtatggatttttgcgatacctaccaattttgagaagagtgctaaggaagtccaatgccttaggtactgttcttatacctcctctttattctctatataggagcgcgcagaagcactgattgctagataagagcttcttaaaaataatctaatcaggtagatcagttatacagataccgaactaagcaaagtacctggagagtacctagatatcaaaattttcgatctttttagcacgaccatatatcggtatttacacacaacacatctaattgggcttgaatttgcgggaatggaatttggcatcgagtggaacatcaaggatccaacgtcgaaggaccactgttggaaggcaagtcacggaattccttacattgaggctgctagccctcgcgacaccaaggtagccgtgaaagactgtcggtatcatcaaaaaccctaaagcctggtattttaccccgtgtacccggattgggatccacagttaacggtttctatccctattagcttgtcctaaactcttgcgttttatcgcaataggtgtgttgttggttggtcagttgttaatggtaatgaacgagtactgtaatagaactataatcttacgttgatatagcggaagtacttagggctcgataacaccgacctaatagcagtagatacggagccagagacaagtagattctaaggccgcggtcttaaggccttgcaggctatcagattgccagctggcgtcccctacaattccacggcccgcttagctacaggcctcagagctacagatccctgatggctcaagccctgatacaagcctttaacgtgaagtccggttgcgcgagcgaccccaccaaaaacccacttcaataataatgcatcgtctttaaccacaacaacaatgctgccccccccccctcccccccccaacgctccgataagaaaagaaatttgatagagcaggagggtcgccttttattagctacacaagctataaaaaatggcaaatatccctcagctgcagctgctgcacgatcttttgagatacctgtctcaacttttgaaggtccagaccaatgggcgcgaatctgctactgaaaagcgacacaaccgctttattcttaccggaattgaggaggggtcgattgaaaaatggctactggatatggattccagaggggtagctcttaacttgcctatgttgcgagatatagccaatcttctactttacgcccgaaaaactatacccactactgtgggtaatcattggcctactgaattcattagacgacgcccaaatctctctactcgcctctctcttaaatacgattatcagagagctctttcagaagacccttgaattattaaaccatggtttgatttggttcaaaggacgattgaaaaatggggcatcgcttcagggtagcgatagcgatccaaatactctttggaccctctcaaagtttacaaaatcgcaatctcggatcaaaaaggtctagaatcttctgcttcaattctttcttcaccaacaaaaagggagattaatatgagaggactataaaagtggtctaccaccacatgtttctctagaatcgctgtaccctattggaggctaccaacgagcaacagaccaaaaagcgagagaccaaacacaagtttactactcagaaaggcatatttgggggtctagagggtggcgaggatgatgtggttgttgaggatgaagatagaagcaaagatatatcttcaccagaggtgcctgcaaaaccggttactgagcctgctttaccttctatgcccttagttcggcggcaggtgacatgtcctggctgtggcataaaaggtcatacatattctaaataccctacacgtgttcaatagccaaatttatgtttttttctgtggttttaatagtggttaaaaattgaaggcttttcaaggtttggtggggtcgctcgcgcaaccgggtcgcccgcgcaaccggacttcacgttagaaccaattacagtgctgtgagggtctcatgtatacatagaggtagataccgtctggagataagcaatcaaaattaagaacaactatgattgactccagattcaagacgtacgaccaagaagcaaaagaaaggtacggtaacttcctcgcgttcagggggaaccgagatacactacgtgggtcgaccatagcgttcatcctccaataatcgtatatgcgtcatttctgtccctgacaagggccctagaagcaagtatcgcgatcctaggagccagtgccttaacatttaaagtaggtgatgtcatgtcgaatgataccggggtctatagaaacgtcagcaaagctacatcgtcggaatctagttaaatagataccatggccgcaaagactcttaagcccaccatttaattactagaagttatacaacgtcttcgctattagagaagatcaaatgcctctacagagaaggccagtagcgttatagaggcccttcctattaccgaacgttcaccgaggtcagtcgctagggtagaagtactataacagtcctgactaatatcggcttagacagataacatctaactcaaagagttaagggcattattacgagtatatatactgaaatatcgagaatacagtataaataaatccttatagtgcaatttcgcgacaatatgctgcgggcttacagaaataaaaatgctagtttagaggagtaaaatcggtctttacttgaatatgtcaagagtcttcagcgagaaaattgctccctagagctcaagcacaacaaactgatgtctgaatgggcaaaggagaggctgcagtacccagagcagcccgatagaaagcgaccttagagaactgcttgaccagatctgattaaccggattttgcatcaaactctgaggtactcggaatattttcacccgcgagtctgtgaatatgaaggaagaagaggtacctagaagggttagcgacgccatcactaggtgttcaacagggattgcgtcgaagaccgagcgtgtaacagtccgtttgagcccgcaagaaatgtgccgaagaaaccgcagccaccttattactcatggccacaaagccaagttcctcaccggggtagcaatagctgtaatacaataaccatgctttactataagaataagtggtctttccctctagcttggcaaaacgaacagaatacccctaaccgggttaaagtggtatcgataggttactgatatttctctccctaacttatataccactttagccgctataattatagtaattcacttaatctattagcttatacaagatatatagccgccccttccgatcgaaaacgataggctcttagaagcgacttgccttcgtctacctaccaaaatgcctacgttagattaatatccctaactactgggaagcgctaattttgactatcaaacattgttagcctctggcttagagcctattcttaagcggaagtgtagaaaagggctagctctttagtagttatcaatgtcgtgccttgtgtaccggtattagctttagacttctggcggacctgctccacgtggaccgccagatactcgcgtggtttcatcgctggataggtcgcatctgtgtgctccattctctatttcactgttcgctgcttgttactgtcgccagaacgatgaacctgacaacctcacagcatattgttccaatagccgtaagtcaaagatatgtgttcctattgcgtatactaacatctcatcaaatataggctggttgtgctctcttgctcgtgataccggttatttgtgcaagctacagtactcatcccctaaagaaatccatacggaagctggaaacgtcgaaatgaacaaccactcgaagtgggtggaaagtagattggcggtccaatggcgatacttgcagattgcgatgaaatgtcactaccttcttgcagcaacggcgattggcgcgcttatataccatctcgtggagcggcagtcactgtatcggtggtacctggtaggcgctatctacctatggttttttattagcgctattgtctatataatagccgtatagaatcacaaaccttagggatcttcccaaaaggaggtagttataaactcggtaagctattttctctagctggatatagagctatcccttaaccgagcgatccgccctagccagtatatgtagctttggataccataagccggttttcgggctttcttttagctccctcggttctatattatattctgggaaaatggaccaatgtaaagaatagtctatatggtagtagagccgcaacctaggcttacgtaaaagctgtattaccaagcactgaaatccccagccaagcagttggttatagtacttggtccctatagataccctctcgatttctaccggttcggtacaatcctcttcgtcgtggaggatattggattttttcgagcgcttttatatattaagatgttagtggaggtaagctataggcgcgaagtgatagtacaaaagctcgaggttctttagaagcgctaagttagcaaagatggtatgtttcatggacaagtactttcgggtcaaggagccgcctgttgatcgggcttttccagagaatccacaatgggtaaatgactggatacaaggccttttcaattgcgactagagagcgtttaaggtggattttctgctgatgcaactcatctgaaaagtcacgatctgaccattctccagattttgcaattcagcatctactgcccgcgtactcagactggaccccagaacaatatttcctatgaatatgccgaaaggatttactacttttatagctcgattaaaatcgaggaagaagttgaacggtatctcaataaccactaatatagagctatggctgtagcaggtgagtttccgagttctaaccttcaccccctatcgtgggctgaataacaaagttttgtgcttacggtgcttaccgcctatgcagtatgtgcgggtccgtcaatacgtgaggctgtgacaaagactatacggctacatataggaagaaatctctagctaatggtttttaaccctgatatatatcctgcgctggatagacttatagattcacttagtagcgataagactctagctagtagccaggatccactatatcaacttttaggagtaggcgaggataggcatactcaccaagtacgacgattcctagcggacagcagcaagctacagtacccatcgcctaaagaaatctatacggaagctggaaacgtcgaaatgaacaactactcgaagtaggtagaaagtagattagcacaagggcgcagaaagcctataaccactaaaccttaagattgtgccagctttataatgcttgcgctctcagcgtattgatagattctgcagcttactggaaaccatatcatctgccgcaagttcgtatatcacagggagggcatgggaagcttggagcctggccttgattgccgcacagccggtccgccttcgcgagcagatcccttcctggggaaacattgatggatatcttaagtggttgatatgatagttgatatgataggaagacgatcgccgaccatggcaaagctggcagcgaagcgtgccagtctcgggtaggatggtgtgtgcatttcgtcccgcagatccagcacactccggagaaggcactgaactgccttctcttcgagaagatttcaagggacgaaaagatctcttggctctattgcttagaatattagtatttgcaacgcatagatcatgagctcctcatactttgcatctatccacaatttagtgccaataaaccaattcatctttgtgtgcgcagagagcttagttgaagactttaagacttacaaaagcaagtgagccctaaatgtcactggttataaagtatacaagagaatatagagcgaggtagaccttggttcatggaagcctttccagcctaagtcaagcggtattgttgatcgcacgcgaatcatattatttggaacccagaaaacacacgcataggtttaggcgggaaggtatgtcttgacaaggaatcgaataagaaaagaacgatattgtgaaatgaaaccgttcaactctgcttcgcttgttattggccggttggaacccggttgaagtgtaacgttttgagggccatgaacacgaacacgtaggagacatcaatatgggttgcattgttcaacctaactcaccattagccctccgcttctttagcataagggaaaggggttggtaccattatttgcgggagttgacgtcccctgtctaactcgaccggtcattgttttgaccgacggtgaatggaaccaccgcattaaaacacgcccccacttacctgtcaccagttgtggaacaaactaggattgcccacagaataaatgaaaaaaatatatgaggaataaataagaccgccattgcattttgaggttgttgcctactgaacgaaaccacaaaaccataggaacatcgaacatcaaagtagacttccgcactagccaatattacacaccgagatctaaattaggttccacaccatcgacagcatacatattcattcctgggtcaatccaaagtgctccaaaaaggtgcttccaccgtcgctgcacgtgtgccattagtgatctcgcccttttgtgccggttggccggttataaagttgcaagttgtgcagctcaaacgtctcacctttacaactcaaggcttcgttacaaccattttgtcgtagcatgttattccaatttctgtgtctgttgaaatccgtgatcaaatcgatgaaattacagctcaacgtgccgattgtatattccctagtgtaccattcatcccaaagttaaaacggaaccaccaagtagtgccagacgcttggtgccttgcaatggagattttggacaggatacaaggcctcttctaacaattgagcggtattcaagaggtagccaagtcggtcttggagctcctcgattggagctactgttcgaaaataacaacaatgaacggttgatgttctgattacaagatcataaagatcatagtccttatgtatgggaaaagtgaacctaccaaggatctttccattcacgcacgagccaaatatcgctggctttaattctaatattgggaccccaaagcattggaaaaggctgctctatagatcggatgagtaagcaaaggcgcataaagtgttgccacggggagcgcacgcccgtacggatgtgtacccagccagcccatggccaaatattgatagccggagaaggccagcctaggctgacagggtgaaacagaacactagtggcgaagtaaatatttctatccaacgaacaaaagaaaaatgaaggggaaaaggttcgaatatcctccaggatagtacattatggttgaaagcgaatgacacgcgaagcttggatcggcgtgaaggaccctggtgcaagtattcaaacagtacgccgatgacaggcaatccatgagagcaaaacattcagagttcccaatttcccactatattctgtacaaaggtctgtgggtcaaggaatggcatgggtatagaagggtgaatgcgagataaaggaaccgaactccacggggtagaattatctgtgatctctacccgtagccgtatagctaactgaaaccgtgattgtctagcgcttattatgtttcccactgtagagttctgcgagaggatgttacttatctgacaacgtatccttcgtaagtttcccagcattgactcaactcgtggaagaaagaacggatactcttcgacagcctctccggtttccgtactgagcttactgagccggagttctatccagtccacccgcttaaaaaggaaaaatgccgatacataaaggaaaatatcatcggcgcaggtgtcttgggataatggatctggccccgtccagctgaaggagcggacgttctcgtagctgggatagaagacacattcaatggcaggagtccccttatatccatgctgagtatactctaaccattccttaaggggttgatttgagcaccgagtgctacggttttctgcgaggtaaggcggcggtatcggtatattgggaaattctctccaaattgattcaagatctagatctaaatcgtagtctgaagggacatcagcgccagtgttaagtatggaagaaatccaactaaccaattcgatcaagtggtcctattattcccatgcaggaagtacagcgttcacgataaaagacagtctcaggaggtaaggataggaaaatcttggtggattcatggggtctatatgtagaggtcagtatgactagctgctagggtatagaaagctcaacggaaaaaaaaaggtccaggaagggtcttggccatgaccgtgagaaggctatgttacccagtgatggtggctcctggtctacgtaggagcaaacggtgaatgatcttgtttcctgctgcaaatgtactttggtgaagggtgcggaatgcccgccccacacatactccacccgttgaactatctcgaccgacaagaccggtcagaccatgttctttgctatttatacgataaccaagaatttggccagacgaagatagcttgtttaatttgctcctgcacggtgtcattgtagcttatttatctaacacgagggcctatcactattctatagtgttccgagaacgccctagtatatggagacaaaggcctgatgataatcccacagcagtagttcttaataattgcagcactgttgaagcttttcgttttctcttaccaaccattcgttcgagttttacaggaagcgacgttcctcttctaagcgtatcttaccggccgacttgatcgtatagtattcctatagacacagatagaggtcgagaaggtcgacagcagaggacaactttaaagaaggatggctttataggatctgagacatattactagtcaaagaataggctgtaccggctggaattatctggaatgtttggttagagccggctataagaggtgaaagagaaacctaacacttgtcttgccctatgacgcttgtttcaaagagtctaatacctattccgatcttcctggcatgttaacagggataaaaaactgatctagaggtttacattttcttttattggctcgtccagactgagacagagaagtaggagagtctattgagccgtttgggttccaaagcttatcgctatccagattgtagaaaacagggataggagagaataagctcgggtaaactgtatttttatatcaatggtcaaggagattatgatacaatagactaggtcctacggagattgtatagggggcacgttccagctacttggatgataaacacacccgtatgaaatgcctcattcaccaccaggctcaataagaggatgccttgctaagggtggatatccttgtatttccccttgacgacgccctgtcacgatcgtataaatgagggccggcaaggaatcgcgggtgcgcacataaaccggttaacatttcgctgaaattgcccgattttacaggcgagaaagctacgaatatcttggtcagggctgctagttaatgatgagtacaatatctattggacttgcttttattaatatctggtcaggcacgacgagttcatacacctacagtgggatactgtaaactgaaatttagaggtgcaaattatatattatctaggtagcaatacgagtgcggcagatcatgatcaaaggcaaccgccttctttgaccaaatccatcatgggacgcgttgcgccgcgtagtccggcgcgaaccacaaggaaaaatcaagaaagccacatgcagacctacaactcgtacagtgactctattaacctaccccctaggtatacagacagaaaacgagccctatctactataacaccatcctaaatcgaaggatcacttatatctgctaaacaaaagggcagctatatcgaatgcaaggccggcaagttccttgccaccgccctccgatgaaggatagacacgacgcattagaaactgctggctcctgtatcgattaccgtgagagaagtccccaaacgcgagaacctgcagggccggcagtccgtcggggccaaatacccagtctgcaaatgacacgaaatcctcagcctctgcaattgccgcagaagacataagcactgcctcctgcgagtctacaaagtcgaggtgtgacctgtcaaagtactcatcaacaatgggagggtagttgtggctatcattggtgacgtcccggttcacggaactccagcacgaacgaggatgccatgaatatcctttgcgcatcccatgtaggtaagtggtaatctctcgtgggatatctcgatgaaatcgctcgaggccgctgaaccgcagatgtagaatctgaagctgggaatgcttggcagtaggtcgaaggcaccgatactgttctcattagcggcactcgttactggaccgaggaaaacttacagccgcagatagactagcacacaaagccagagcatatacctagcccaggtctataccagtagataaattcgtaacccaagcgggcgacacatcccgatcatcctcaaataagccatcagcatcgattggtgcgagttggcgctcatggtagacaaggcttttcaacgtggtctggtggtgttggatggtgtcctggatgtgggattttgacgatgggaaattggacaacctcaaatgcagatgctgcagcccacgaaatgaacataagaaccgcataatagcagaaaggccacatccttcgcccggtttgtatagcagataattgaaagagaattcgaaatatgttagtcggagcggcttctgtgactaagacagtaattgtataagatgcaactgattcgggcagtcacgcagcgtaagcgaccgcagagagtagaatatcgtattatatcctaatgagatatccaggggtaaggtcacctttgacaataatagtatagatagagtagaaagagctataggattcgcaatccctatatcctcgttcgtagtgacaccggtccctctacccccttcctcaagctccggtcgctgaagcccaaggctctgctagcacagagtataggtaaaagccgatagaacgaagccgatagatagatgatctaggcagctctagttctaacggatgcactgtcgcaataaatcaacctcagacagatgttagagtccttcctacttaaacgccgttagataggttagtctagacattccttctaagcggtgcgacattttagggcaggtcctatcagtgacaagtgagagacaagtgaggcgctgttagtactgactgagatagccttcctggtcaagaacccccactggaacacatgtccccagtcgccatctattgttagtcagccacaggtctagtcgataggtatcgcttatactgacttaaatatgctcagtctattcagctctaagtaggtgaaaattagctgcaattgatcctttatatcgtctaggaattactgatgtgctgtcgtatcatccgatgctcccagtggggctggggactctggcagccccgcggcacaaaagatattgtagtatgcacatcgattaaaccgaataagatggaatagagccctgatctgtaggtgccgtgtatactggagatagtccgcggctcgggaaggaccgagatggcgaaagaaggggtcgatatctaatacattcagtgcctattcacttactacacagaataaaactgtacggtatatctgaggaaccaacactgtatacaatctagacgaggtgtagctgagaatacgcagagtagtaactagtagctgacgggcggtcagtacctggaccaaacaaaacaaacatgctgggcttacctaatctacaattagtattagaatctcatacagcaaggtctctagcattgtcctctgtgctcacttcattcatccgctccggacagcaagaggcttataagcacgcatctatctgagcacccagtcaagttgcacagacattgcgcagaggaaaatgtctaaaatctgtgggtcatgcatggcgttggcaagctatttcatccggtcactgataaataggctcagtgccgtttttgcagccgctcttcacccgcaggccgccaggtcttgtgaagcgcgttgtcaagctcaatggtcgttcggcatgagcgacaagcaaccaactgaccacagcggtggccatggtatcttccccgaaattggcaaccagaatattgaacgacgagtcgtgttcgagaggaattaataagaacgttcaaggggagaacaggtcatgtcggcgcacggttcacgtggggcaacggatcaggtggtggctgaaacggcgagtgacggttgggacgattatgttgcggtccacctgtacagcaatttcgaaaacagtttgctcaagtgccatgtcctacaaaataggtgacagtagtaggtcaagcgagacctgcgttgacccggtgtaaacatctaacatttacatgtcaatgggcattaggccgtttacttggagagaaaatagaagtggaaattgcgtttagggtgcaatcttcgtgtcggcttttcactgagattgcgcaggtttgtcaccaggactaaggcactgggtgatagggtttacctatagggtggtcggttgaccgggcaaaaaccacccacgtctactgtcgtgcaagaggaattgattatcagcacatacagggtgaatggagatatgagctgcgagacccacatggtatgtacgagttcccctgaacgcgaatagcgacaggcttcctcgcgttacgcctgatagagtattcaatgccgactatagttgttcttaattgattgcttatctcaagacgctacatatactatgtatacgtgagcttatcacacaaacaataaattagtctgggaggcagtttgggacgtttgctatacgatacgggggttatgtctcggaaatatatacagattgtcagcgatctgaagtacacaagatcttggctatcacgataaattgtgatcagatgaagaacattgaatcgtccagatttcaacaccagggatgtagcctttttgatcgacatggaaggaatccaggcaagggccagatatgagaggtaattaacaaatgttctgctcacgccgactttgtagtctgccacaccttctccaggacccaatgaaccttaagctgtgttttgagccaccgcatgcaagacagcacttgaataagtgacggcattgtaggccaggactaaatgcatcacatagaggctgggccgccagccatttaccacgccaatcctttccaacggatgaaagagatagaatgtagtgccaagagaattccagatggccatttgcccgtgatgtatcgccaatgagggtgcactctgggatgtcccagtgagggcataaatggttggtatgagcgaaagtaagcccaatgaaacgcagctgtacggaaaccggtaccgcactgcacagcagcttggatcgcagattacaaaatccaccagaatctcgacagcaacgacggtgaaggcagatatgtatccgagctcgaggtagggttcggtgcggaataacacaaccacagaaggaacggtggctgcccaaatcaggactaaagcggctccaaactccagcttttgccactctgccgtattattaccccagaaagcatctagaaagcggtagaagacgctggatatataccagaagataacacctgcgcaaaagactagcatagacagggagtccaaaattcctctaggggataaggggaaatagaagagcagaaaatagactataaaaaggtaaaagtaaagcaatataaagatattaattatagtgatgattgcaaaatcgtgtaaggactgcgcttttaggtcagccatttaggtcgttggtcgtgtacttgttggagcgaggacatggggaaaactgagcttttaaggtgaatagcaagagcgaagtagctgctgaatcggacgccaccctggcctgtgtattgcccaggacataaccaatgtaacttagtagaagaacatcgtgagagagaaggtcagacaccgtgcaacggttaacaagtgacactaaccagtggctattaaaatgcgtggtcaagagagggtggtcaagagagggtggtttagagagattaagcggtaccagtacagaaattaaccatgctcggcacactggtgttcgtttctggggggcatcatttatgtggtggttagcgatagcctatccttttgcctgggctggccagcttaccctcggtctatctcacgctcatcaataactggcacatactgaaataatcaaacaatagatgcgctctgaactgataattttgcttgtctgaatggacacgtttacaaagctggtcaaaagcgccagtaattgccacctcaattctgcggtccagtagcccacagcttttacatcagtatttattcgggcaaacacagtggaagtttttcgacagatacctctggtaattcgaattcctcaaccggcccgaaagaaggcatcgcatgattgttaaaatattccccgactagttggcgccaagcaatgactctccacgtcctggatcttcagcaatcgagttcttgtcggaatttttgcagtataagattatcaccgctgccaatatgacaaccaccttcccacatcagataacaagatcagcagagcactatagaggaaattgtcgatatagttcgatagatcggacggtaatagggagaaaatgtatatttccgaacctgctacgccctttttaaatacctctaggataaggccgagtaagcgtcctaggacttacttcacctatactaatccggtgcttttggttcctccgataacgaattctaccctgtatatcaggttgcacaagagctttaagtctcggtgtacgaactggctgagtagggacttaaggcgcagttagcctatgaagagttttgccagttggaccccagctattcggcccgtaaagctttcaaatttaccaataccgtatacacagccggaaagactgaagctaatatatcctagggtatctgcgatagctcccggtcgatacggtttataatgctactagtaaatgacctctaaataaatcccatggatggctgcatgatcgcttcgaagaacattgtcttgcaacggaacatttgatctggaaagctcaagctcgaaagcggtcataatcatacaagttagtaatattagcctattggcttcttttgatatgatgtcctagacctgtagtcctagaatacatagaaggcattgtaacagtatgcctagtgtcactaaaacagagtttgagaaaccattggacagaacaaatggtaaaactgattccgacccgctttgtaataaagcggcggtggcaatggtgtagttggctagtactttgaggcgacctgcaggactcgttcacggaagaagcgattagagaaaagagtgagagaacagtctcaaagataccgtatcgagctctaagccgaaaattacaaagatcttcgcattcaaggtgctcagcaacaattgtgacaagctccgggctcaggtagtcaatatttgcggacatattgagcgtaaatcaaacgcctggggcctgtcggggtgtaatcagggaagaccgccgatgagggaggggcacacgtatgtgcaacagtatgggtattatgagttataggtcacgtggtaagggcttatcatacagttcagtattctaaattcagctgaactaaaggtagacttgtagtatgtttcaaggtagagtttgggaaagaatcaagagtaaaatgttgaaacttattcttgaaactaatttcgagcgtgtctgtatttacacaatagggtagcctgtacatcgccaaaatcaaggagtcagggtaaatgaaataatccatccctgtggtaaagcatctgacggaaatctggcatacaacaatgtatgtaacctcagtggtagtgaacctctaaaaaaaacatgaaaaaaccgcgatggttaaacaagccatgcggacctcgatgactaactgtaatatgcacttttgtatgatatggttggtacgtaccatcagtcacatgattttctgagtattttatcctgtctcaaccatgtattcgacatcaccttctgcaatcataagacattgtggaaatctacaggtaagagatgtatcgagattactttagcaactttcatctctcatattctttatcgaagtcgatcctgtaacactgtagtctacatctaattaggcctgtgtacgtgtttcctagcttgcccgcttgctattccatatccacatcaaatgcagcagcaaaacatctcaattagctatatcaaaagcgctgtaaaagagaatgttactactagccaggttatagcgaacgaatatgccctaagacttacatcggctcccagagagtaaaggatactctatatagtacctgtgattaacctatagattaccgtaacgccaatagatacgctggcgataaagatagttatagactcagcaatggtcagcttactttatccagaaactaatcacagggcccttactaagtaagaaatgataagtaatattttctcctataaaaaaaatattatagtgactccgaagataacagctataaacattaaaataaaacctaagatataagctgagattgactaccgagaaatactataatatctagtaagtaccttattattcctatctagtagtatcctgtcgatagctagggaagctgagcctaaaatacttaataagtcgaacgagaaggaggtactaggttacgagtaattggaataagatgatgtttccttctggccttggcaatatccccaaagccccacagaatagaaacccggaaggtataagttgatttcgtctaataaagattaaatcttatcggttacctggcttactatagtctctacagagcctagggtataaattacagtagtagaagcgctatttatagcgctattagccttactattggctttatttataatatcgattctgtctatgctatactgagggagcgacgactataattactcctaattttaggaaaattggttaattctacctattattttggctttagctaactattccttgagttttatgggatattagctacctttaagaagtacaatttattaggagaagaggtcgatatatatcctgtaaagataatggctaggtagactaaagctgctatagagaaagctaagggaagtattcttcctatatattgtagcattctatttatactaccaaggaatctagggaagtcagtgttaagggtattcttaataaaagcgccctgtacaagtatgtggaaaccatgtgctctttatagaagcgttaacatgtggttgatgtcagaatagaaaaatatattaactcaaagtaggggaactcaggagccatccgtcgaatgtactcattgaagtggaaacggcacggccgttcttaagtgctgttcgcggttggcaaaatgaccctcaaattttgttttcagccagatttggcttaatgtgatagacctggctaaggcgattgatatcacattacagcaggttttactggaacgactggggccttaacagtgagtgaacggtagagaggataacgcctgatttctgaggttagtaggttagctggggcggcggaaatcgactccctcaacctcctgtggggaaggctaaccaccattcatttcatacaacggaacgtataacatcatcagcctaaagttgatgattgctacgatatttcagacgaaatggcaaacacctaaaaatggctctttctttcagggtatttaaatagtcccacccgctcagcagacaagctcaagcatacaacgttcactgcattacaaaatgacacacttaatataagcctaagtggaagaagccgagtacaaagtattcacctatcgtgaggaacatttcaaaatggcagcacgggttgatatctctcgtctcgtattcgataaaaactttaagcggtaaatgagtaaccgctaaaatatcgcttgtcttaagtgaattctggacacttaagggtgttaacgcctgatggaggaatgccatgtacctgtattgattcctgacagtgattggcaacgtcgcgttaggccacggctggtagatggacaattccatcaattggatgtcgatatcgactaccagctgcgcggacaggaccacgagaatttaattattgctgcccggaaaaagctcagctctagtaattcatggtggattgtggatgtttatgttacagggcagacaggtgcgtgaagaggtcgctatcccccagaatatctttgcctgattacattttagctggcgaagaacctttacaagaagaatttgtccgatcactccgggaacgcttcccgaatgatcaaaggcctccggatgggcttatatatgagcgaatacggtattatgaaggatatctcgacggccccgtaaacaggatcgcagcaaaccattggtgggctgccctggaaagggttcctggaagcaaaaagggaaaatatctgcgggcttttcttaaatatcctatactaccctaagccttcgataagctgctccctatagtaggtatctaggagggtatacaaattgggctactacataagttagtatcaatgcgctgtgataaggtaagatactgaacccaagccccatgaccgaaaggctaagtggatgtattagcctctcctatactaccttaaccatataaaaagcaccttttttggcttaatagaggataggcgggatcttttggcgcaattagacggcgtatccatctaattattaaaatcctgtatacctaaggtctctactcgggacttatggttcttagaagatcgaatatcaaaggaagaattgttccttgatattaaagatatttaagactatactaaaatttaggaataattgaaagagatttagtaccctatactaatactagagatattttttaaagataggatcagtctagaggtaggccggagtatactatagtaactctatattctagatccctatcggaagataactgtcgataaagaactcagaaaataatattatataagtatccccattatagctttaaatcgctagtatagaatttagggagatctttataatttttagcgttttagcttttagtatagattcgaaataactaattataagtactgtatatagacaaagcctgggacacaactcgcgccgacacccatggaagaacttcacgaacgacagaaactctggcaacatctcttttggcttgtcagagaaaaaggctttagcacccctcttgtggatggactaccggctcacccggttgaattatcccctattacaccgtgtgactatcccgcaagtgtggaggaagacctaccggtggaaagacgaaatggaacgccatataaggactcaatggaggcagatcattttgcactctcgcgggaggtattggaacggccctggagctccccccgagttactgcaggatttgctcgacgatcggtgtttttggcatatttccgctatctcaaagtcgaaaatggcagtcaatccattcctgaagtcgaaaccaacgaggcagttcctcaggaaccttctttgtggaacccaagctttgatgacctaatacaaaatacgatcattccaccagaagaaaatgaagcaacggtgttccccgtcttttctaccccgcagtttgatcctacctcacttgctccagccggggatattcagccgctaagccgctttagtataaagtttattattcctagtaagcctaacaaagttgtattactaccaaatatttaatctactttaaataaattcttcgaagggttcttaagatatcatttccatatatattctagcgataatccgatatggggtatctatgggagagattattattcgctatacttagggaatccgtttctacttttacatgccgaatacataggagcggatctgtctaaaacggtattttatgggtcgactgactagtaggaaataaggatagctaaaaagcgatatttaaataagaacgaataaagtgaacttatttctactaaagaatggttaaatgtaagcctgaataagttaacataagaactttccgaaaatcgagtcgatatagatctccccgggggtaaagatagtataatataaatatgactgtttcggccttgctcgtgactcctttgtgaattccgttgtggatgggttggtggatcctcgtattggcaggctgcgctttgtctcacgacccttgtccattcgaccttcccaaagcgctcagaagaggcaggggaaggtaggcaggtataaagggtcgttgggagtcctcactgggaccgggaaggaggctgactatctgtttatagttccttctcttctattctgatgcattgcgtctgaatctttctcgcggcatggcaccgatcaatctggacgacgtcatccattatcgtccgcctgctaaaaaaccacatttcaaaccgctccgggcacccggttcccacgatcgtatctattcacagatacctttggatagacccgcgccagctattctatccagccagcactggtgttcgagtcttccattctcggggcatgcgccgtaccttcaaagtcatttccatgcacccagtgaagtcgagacgttattagcccccaacgagcttgcggaagaagtgaccattgacagctcgaatgagtttgacatggatttcttgaatgcctcttcggaaagagatgcaaacgttgctatatcaaatatacacacggcgagtcgagaattgccggatgatgtttccagcagtgatttagggcaaggtttatccgaccagcttcacgatggtacgtggtgaccatcattttgacttcccttgatttcttcaattcactctgttgaactcattgtgccctatctctctttccttaacgataaagtgttcgacaacagagggctgacttcgcactttgagaccagacttccaaggtgacgagcatcatgagagcaacgtgacatcttcttctcaagatattattcaggggggaggtcttgagcaatccacacctttatactctacatcggtccgtgatggcctctgcatcccggtggcggagggaaaaattctaagccgaacagaagcatatgaaaatgcaggtcagtgctctcagtcagctaggttgcccagtcctctggctcacgtggtagaatgcagacgaattcacgatggagggagacattttgcgacattcaaacccgacaatagatatagcagacggcaatacaatggtcaatggccaaattcttgaccctgcgggccaggaaaagcaatccactccaacgcatttgttgtccggagatgcgggaattgaagcagacaaattaggattgaaaccggcagcttgcgtcatcggggaaagcatgccagccgaggagtacaacagacagcccgtttccgaaagccaagtggttattggccaggagaaagacagggctgcagcccatgataacaaaggcgagctacagcatcgtcatgcggagagcctgtcagcatctccaaaacctcgtcaaaatggaacactggcgcgttcaatctcacccgcatttcaaaacagtgagaagcagtcgccatgcagcccaacagtggaagttacaggattctgtccagtgttagatcaggccccagtgttagaccagccgtcggtcgtcatctccaactcccgtccccaaaagcgaggaacgaagaactctgtctcaataacacgaatggcctctccgaacagaaagcgagaccgggatgagtatatatccgatgatagtagcgataaccctgatggccccgacgatacggactatgtgggcgaaagtagtgaaggcgcacatggaaacagcgttcctttccatcgactgaaaagagcaaggcgacctgccatgcagcttaagcctagatctccccggcagaacaccaaagtggccgcagatcagacttccccaacaagcttgcacgaaatcgaaacaattcctatccgaggtttccttacgcgacagatacttttgccaagggtcatctattcggttacctttgaagagcaggcagagctacatcacaatatgaaaacaaaattggcagccagcattccaagcaatcccccaaaaaagggtctcgcgctgggaaaatgactaggccaacccgaatcctatctaaggacgaccagcttttgattgaattgaaagaagagcggagcctgccatggaagcgaatcgcagagtattttcctgaaagatcggaaggctccctccaagtgcgctattgcacacgcctcaagggccgcaaggccggaaattctactgggcggtgttccaacgcgagaagcgattcttcatacagaggcggaccttgcgaggcagttcaagccgcaggtggcaagagcaagggcaccgaagaagatgtgtcaagaccgcgatacggtccacctcggcgcaggcaaacggtggaccgctattccccggtttgagttggcaatagttattagtctttgtcgaatatcagggcgtactatatatgctgctgctgcgacaatcggacgttccgattgttgttatgatctttttgcgcaatggttgaatcatcttatgtaattataacaaacgagatttttatattccctgctcaagtttggcagtcgtcagttattaaactcaccatttctagtttggtatcactaccacagactaggcgttgtcgtcggtttgtcaacaatctcagatcattcatcgacgaagtaacgtgaaacagttagcgtctctgtttccaaaccccagagtaatactagtccaaaaatggaataccctgccagtaagagcttgttctcatcagatcaaaagagattcgaattacatgtatttacccgttcgcccataaaagcatgtgcctcaatatagtacggatggacgaatggttcgaagttggatcccaggttacgtaatgtatatatgtctgtatgagtggctccctgttaggttgccattccgctaggcagaagggagatgagttgctgcggctataattagctggatcttttcccaagactggatataattatcactcttgtacctgaatccaagtttccaacttcgacgaggggccagggtaaatgaaatcacccatccatccatactgtatccccaccaacacaatccgcttaaccccaactccagccccaactcagcaaatcaaacccatcaagacatcgttacaacccaaagcagtgtctcatgtatcggttttgaaataaaaactaaataagagacagaatagaaaggcgagtgaaatactgtaaaggcaatccttaatacttctttctccccttccccttccctttccccctgatgttcaactccgcaaactctaactcctttaacctctccgcgagaaccgacgaatcctgtatccccggaaaatcctttaccggataaatacaaaacagatccgaccacgcctctataagaataggcatagactgacccgtatccttaaccgatccccaattcattagtctgaattaaagccggtacgttccagccgatcgaattgaaagatcagtaaagataaagaatgtagctggttaatagagcttcgacgcttggtggttgttatcggggtccagagccaatgaagggctttatatataggaggaggggtgtataggggtggaaatggggtctggatctacatcgacatagaatggggatataaagactttgcctaagaggggtattggtaagacctcgtctacacgggttacgctatctctttctttttctctttctgggccttgcttatcctaggaatgcagctcattgaataagtctgatataaggaataataagcagccaactgtgaagcgtgggtcttatagaatatcacggttatcttttaattagtggccgaagtctgagaggaggatttggactattaggggtagatcgacagggcggcgattctagtcgctcgtaccgcatactcgtgaggcaaggggctattagcggatatggaggtaatagtgggatagtgtgggttttcttcggggtggtagaggggataataattcgggtttatgatagaggagttgttcgaagctatggggcatgctatactttgtatttcagggccttgttgcctgcgcgctagctagcgctagtgctggagactgagcttctataaacgcacactggcttttctgagtaagcctggcccagtatagctgttgagctgctgctatggctgtatactcttgcgtgtcagtacaagttcctgtggtggaagaactcgtgcaaaggctcttcacatttttaatatagaagaatcgcttaaagtcggcaggcatatatgggtatggttggctagcagatagagacggctcaatcgaaaataataacgaaaaggaaaggactttaccgggatttcaggtcgtgtgtctgcacccgaggactatattcgctgccgtggctcatcgcgggattcaatttttccttatatggagcagagaaacacctacaccgcttataatgatacatttgcagtggcaattcacatagtatatgtggatggtttatataggcattctcttgtaaggctatatacctagcgtcgcttctctctagaagatgccctattgacggcgactggggaccaggtggccctaccaatattaggcggttatagaggatatacagagataaaaagtgttgaggcttgtgtcgcggatatatatgatatttcaaaggcatctggccggggtggtgtgggtgagagaccgggccgatataagatttgccgggtgtgggatgcccacattgcgacgacgggggtcctcggcatatatacaggacagataagactggtgcaggtgtacaacagtttgcgcttataatcaaagcaattcgcgcgggattcagcttgtaggtgttgaagacacccgcgggagtaatcgatgtctcaaaaatacaagtcttctttttaaatcatgtcaaagtgcaggtgactgcagggaatcgtgtagaaaagaaagatatatatcttggatctgcttggcgccaagtgaaggcaactaagatacatatactggatctgcttgccgccaagtgaaggcgactaatgaaccgctgcagggtgcagcccatcaacaacgtggcggtatgggacccatatgtaggggcactggataacccgttgggggtggggcaatgagcgcgacacaagttttagtgtcgcgctcttacttttcgcccttttcagtgtattcgcacgccctccttaaggagacaatgagaattgccttgatcaccaaatggcagaataggccactgatctgaggttcggcctataagtagcgacatgtttactagcctgtcaggttagtaagccagcgcggtcgccagttaatggacaaatgaccggtgctcacaatcgctagatctcagcctctgtctcttatttcggtcttcccagaccactccgtccactctccccatattacgagtttgtttaatgggaagatgcgtagcccgaagtactggctagcttattcgatgcggatggatgacatgttgcgtgtgtgctagaagcacgaaagtttcgttaccatgtattatgtaaccgactgattctggtaaacgcaccaaatcctctggtgataggatgtttcagataatctcgaccctaacgatggagcatatccatattacccgaccttcttcagaagacattctagtcaaccgactgtattcctggctaatacaattcatgccaatcactcgctcatcgtaaggggaaagacatattggaacctccccgccttcaagtattttcatgataccacccttgcctctctgggctatgtctcgtgacgtgagaccattatggaccattacagatacatctgctccgccatcaagtaaagctttggttgctgccatgtactcgagctcgactgcataatgtagcgggcttcggctctgatcatatcaaattatagtcgtgtcctccctggccgaccaagtagatacgatgcgcaaagggtttcagcgccagtcccacaacgaacactcaagtggcagcgctaaaatagaagaacacatttccctcctgcctcatgctctgacggtgcaaacatcaaccaggtcgactaacgcagtggtccatgggtctgtggaccttcatgtgcacacagcagtcgatctggacaggaggctttgcctgtttttccctgtcccgattcgatgaccacgccgcgtgttactggatattggtactagagttcgaggacgcttcagccacctcacgtcctccaagtcaatgataaccaaacggccacccatgtcatcccatagtatattacgccattcgccatcgctatagacaactctgtgcgatcggagcacaatcagggctttatcgcgctctttatgaaagaagctagaattctcatagttaatgacatgctaaagccgcgttccagaccagctcaggattattatctgggttattaattcaccatggtaccaatataagacccgtggctgaaagtctccaagacagacggggatctgatgtccttgtaagctcctgaggtgacgataattgttcacctcagcttgaaggcgatgctgcttctccactgtggtagctttaatgatcacagtgtatccatgtgatagaagggtagctttcacgaggtagcctgtccgaccacagacgtgcaactgttcgaacccaaggtctcgatctcgggtaagctgacgatgaagctggcgtgtgaactcctgaggtcccatggagtgtctctgaccaccgtggtgtttccagttggggcattttttatccaggggttctcggttgaccatgccgcagatacaggcgatggtacagtatggttatatagaatgcccgtctttccgagaagtctgtttattatcacagtcgacttgtgtcctttcgcttcccctagttgattaacggttgttacctaggccgcggctcaatcggctgcgcgatgctgctgcagtagacggtgaatgcgattcttgatcactgccgctgctttcagtcgataagtacttcggtgtagatacacctggttaacaacaagcgcgagcgcgagagcgtgtattatatattttctaatctcgtttccagcgtgagggccgataattagaggcccacgggtctttacggagggtttcggggatttctctcaatatatcgagatattcgacctcctaggtcgttagcttatcgtatgccgcatcgtgccattcttgagtcagaggttcgacggctagcgcttaaagggtgaacgcaagcacctgcccgatggcggtccggtggaggcgcaattcatcgtctgcctgcacgtcttgatttgggatacacaagaaatattgaacaattgtgggatcatctttcgggatatggaggaaaacaaaggcctcccctgtgcagatgtagccgtaccgaactccactgtcgatcatgtacgagaatatctgagtgaccacagcggcgacgaggcgggtggcataaaattcgaatgtgtcgccctcctggtcaatgacatcgctagccagatccatctggtgtagacccaccaccaattcggcgactgttaccttgtgcggcgctttaaactccactgcatacactggtatttgtcgttcatcagccgtaaggtgcacgcagaactggtcggcgcgccgattgcgtcttcgtgtagtaccatccctcttctgtctctccgccgctcctccccctcttcctctgcctcttccatgcctagtgttcgccggtcgttggggtgtccgcgcgtcctgaagattcatctgttccaggctgttctccagcgaagtttctgatgggtttgcgcgatcatagaaggtgacccgaccttggattctaaattcctgtcgaagaggttcatcgtctcccaaagccttaatgaccttttcgacaaagttatccaccgtgtctcgctcaaaattccgaagagacgcttccgaatagatcggcctgttctggatattcgtaacgacataatcgatttgggtatcagaagggaatagtgggcgcgaggtaaagccagcggtgcggtcgaatttcccccaaacttgttcttgtagctggggaaagtcaagccaagggacaatgtgcttggggtagagtcggttcactggatcggtcgcgtcgccctgagtcgtgagggtcgcatctgcctcaacttggatcgcttgggacagaaaattgtggcagcgatcgaggaggcgagatagtgtgttgggttgcactcgccgctctgccgcttcccgtgctagtctctcttcctcctcgcggcgctctgcctcttcccgtgcttgcctctcgatttctcgcgcctgtctctcttcctcttcacggcgctcagccgcttcacggagcctttgttgttcttcaacctgacgtcgtaattcggcgattgtctcctccatccctggttgaaaaaattattcagcagataatccaactaaacaaattgaagtcaacagagtaggggccccagctggcgcggggaatggaatgtcacgggagatgggcgtctgcttgtttacccgcttactcacccgttagctcagagtcaattagtgcctcaggcattaaaacacgttgaactttcggttggtttcaggcattgtctccaaaacatgcccgactcgatggtatctagatttgcctcgtcagtacataggtaaattcggtcctccttccaatcctcaaagtacagtcaccgtagcgagacgactatttcaattgcatcactcgcgaggcccacttccgtcctccaataaaggccatttgcttcgaaggatagctgcgttgtatgatctcgctgtgaggaatgcacaatgaagctagtagccagcaaaagctcttctaaatagagaataggcttaccttctttcgttgtccgtctgttctgcctaacacgctactgtatgctctaggctttgggggttagacatcatgcagtcattatccaacggacctcatcgacaagtaaagacgtacctgccatattccttgtcaggaacaggcttgcttgcttaatgctgatggtccttgattgagccatcaggccctgaatacacatcggccatttcgggggtgattagctcttatatattgcataagatgcctagtggaggcgaggtcttactatccagaactgcgaactccaaaccgcgaactccaaaccgagaaacttcaaactgccgacactcccactcctgcttaactctctaggctagccggcgacccaataccgtagttggcagcgctatgaaggttgcgtatggctggcgactcggccaagaaacccattttcaggccatttttggaatgagtcagcggcttgccttccattccagctcgcctgatctcgattaaaggcaagaccgcgggaccactaatgacgcagtgacccctctacggttcagacccgcatccagccgatgattggtttacaggaagatgactaaacatgctgttgtgacgtaactgtaaatatttccccagagagtgtacgaagtacgtaagtggaaaattgcaactaaattgctattcagaaccgcgaactgcaaactgcgaacaagccctttgaggagcaagcaaccgttgccatactgcgagtccagccaagcacagcccgagcgtagagcgacagtctgtggagcgttccccgcaattttaagggacttagagcccctatgaatagagacccattggcctagaggtttaacaacggaaccaaaggacgtcccaggacttcgttatggcattattgtaaaattggaaacggacaactccatgtttattgggtccagaaggctgactaaatataatggaacaatctagaacattgtaaatttggaaaatctgtgtggttttaatatgtacaactggggtgtcaatacttcagtggtagtaaaataagagaagtgaaaaaaaaaccccgtcatcagactggttccattggtattaaatctatcgtattaaaacaagagaaaaatccaaatttggccctcagggaccgccggctctgggatcccatcccacttgcagttcctgggttctgggcggttccggggaacgtggttggtgttcctggtagcccctgtcagagatcgagcatatatagtagcttgggtgtttggtcgctgaccaaacattgtgcctttttggccagatggcgtagtggtaaaacccaagcacccatgaaccgtcacagtttcttgaggtgtgttctgggatcacttgatccgtgcctaggagcgcgtctggcgttcctgggctgtggttggttccggggaactcgatcggcgtttccgggaaccccacatcttgttcctgtgtgcagctcgagtatcttgcatatatgttgaacctgtctaaaaaagtgtcatgtagaacgaaaaagatctggtatcgatgcgagataggtaatcagaaagatagagatgccaagcagttgcaagcaaatgaagattaactatatcagtttgttcaacaatgtgactaggctaaaacttcttcttgacctagaacatggatgcctattggttttgttcgcgagttcggatccgacagacggctttgcttcgatttccagtgaccacatcattttctttttgagttggtcctgttggaacccggatttccacttgcgtttgagaagtaatgatcgaatttaacacaaagtgattgaagtcagtgatttgcagcttagattgaagcgctcacattagcgatacagacagagccttcagctaaccccgaaatctagcactaactgtcatcgggagcacacgaccaagttccgccttaataataacaccaacagaactatcgatcccactccagatatctctaagacttaggactttgggctgtttatgtgcaagccttcaattattattgcattatgaggctgatagagatcagggatcaagtcgcaccattagaattaatcccgtgtttacgaaaatgataattaacttgatgttctcattacatacagcctcgtgtttctcctaaaataccaatcaattttttgaattacaacatttatgaagctaatgtcagtggaagagatctgggttatgaagatacgaaacgaaacgagggtacagcatggatcgaaatcagattcaccagctacacgcagagattctttctccctcttttgaaacgtcgctatacctattacggttaatctacccccgaaccccattcttggcagtattccagtacgtgtgtaaatgacagcgtaaaaataacatccgtaatgagcttgtatggtttcaacggcctctagaacgttgatcctgcaaaacaaagcaacaaaagggaaatccgctttgtcggtggttatttggccagaattcaaattcgcttcccctcaatatctcatcctccacagctccacacgagtcctctatttgcaaagccagagatgttgaagaagttttaaaatgtggattctgatcaagaacctctttattgacagccctacgcaagctaaatttcctgcgactccggggtggctccagtccaagtcatgaattgcccattagaaatggaaccttacaaaatctggatcaatcaatcatggtgtcagaggataaccaggtggtctaagtctattcctaggtgtcgattcaccagcaattgaaggatgaaggatattgcgtagatagccctggaggtatatattcctgctttctcatatgtaacatcattttaaatgttgagcaatcacttagcaaatgccactaatccccagccgacttataaaccgtctgcatgatttccaaccttggaaaccctgcccaatagaggctcttttacccaagtgattgcaatccatggatactgtatcactttacggatcagtatctcctctgaacaagatccactatacgaccaccacagtgtctattcgaataactttcctggaccggttgcccaagctttgccaatagtttccgcagtgccgcgcgatcctcatcgtcacattctggtgacggtctccacgcattctcaaggtctgcgagttctttgggatcctcaccttccatataaggcgaagggccatatccatcatagcagcacatgtaccgattgtaatacagcccgaccttgatatccctctcctgctcaaatggaatatccgggtaccagttactactgccgattcggaagtgtcgcagttttggtagtttctctgcaaatagatcgaaaatatggtgccatcgcttctcgaacgaaccatacaaagactcactgccctcgcggcgcagcaaggcatccgtaggtagagcacaggcgtctacattctctttcatcatacaaaagtcgtagaggacggcgcagtcatcgaagtagatttcctcgagggtgtcgccatgcttcagaatccagtcgatttggccatcatggaagaaacagaagtttcctagtgatagcgtcttcaggcgtggaaagaacagattggatagatccaggtgagggtaaaagcccgagtattcacgcgagcagagcgagagatgttggagagaaggcgcagcgggactcagccatgtcctaggcaactccttgaaaaacttgcggatttccggatactgatatgtttagaaaaagcatctcgatggaggatggggtgggttatacctcgagatcatgctcaggagcggcgtcatttgtctcgctggtaatgcttaggcgaagggacagtaggcccgacaggaccttttccattttcgcaagtgttttcggatctttggggttatccgcttgcaggttgcgaataccaagatcttggattgggtgccgtaaggattcgagaagagagaagagcttatgcattgcgtggaatcgaaattgaggcgtctgggggaagtccgtataatggaggtaatcccgatccctgctgtctgaagtaaaccccttatcgaagcacagaacggcggcgttcagccgaggcaattctttcacttgcggaacaagattgtcccagccttgcggccatttttgctcttctccatcatcatagtcctgtgcgcattagttgttgcttggagctggataaagatcatcgtacaagactctcgtccacggtgtctatgtagatctttcgcggagtccaatgtagactgggattgttcaaaatttcttgtaacccattttggcttgtctcgctgggctgcaggtgcacggtcctgaagggctgatcggtggccagctgtgatgtgaaacggcaggattggcgcagcgactttaatgatgaaagatccacattaaaaaatgtgcgagcgagccgttcgctgggaaaattgagaaggcgtgacatctgggcgtagtcgcaggtagaattcccaaattgatgagtcgaaaggggacatgtttcgcttagccctaggctcctatcgtggcgtccaaacttcccaattcggtaaagcctcaataaatcacatgactaaaaagtagactgcggtaggtgatctgattagagacagaagaaattacctgccttgatcttataccccgtatttgccttgagggacgatgtatattttcgtttacactgctcatgagttaaacacgtgaacttaagcgctatcatatgtaaagctgccacggaatactaaatctctgaccgaagtgaacctcacagttaaccgtagcgtaacgattgtatctatgtttaggaaagttacagccccgccatccgcgtaatatatggtgacagaacatttcaagatctcaaaacagactaaagcatagggggtctagtgtgtttcagaataaagttcagaaaagaaagcaaacaaatcaaaggtgaagctgatttcgagcggccctgtacgacgaacacgaaaagtcaccgccacgattattgagaccgagacgcaccaccagaccgcgtaacaactatggccaagagcaagaaatcgaaatccagcagagaaatgcgcgctctcagcagaagaagagaacccggggcaagccagtagcccaacgtgaagcggtgacttcggacgacgcgtcgactgagagcgacgacacgaacgccgccaatcttgtgaaagagctcgtgaaactgaggagagacatcaaacggcgagatgattcgcacagagaggagatgcagaaagtgcaagaagaattgcagaaagtcaaggaagaatttagcgccgcccttgcagaggttcaacaggagctgcagaccttggcagagagaccccttcccgaaccatgcgcgcggaacggccacgatgagatccttcgcgaagtctaatccttacgcgaagaaatcagcacccccgcccccgcaagctccccgtcctatgcagatgtcgcccgtacccccccactcagtcacccgagcaacatacggactctctcaacgtcgaacacaataccaaccactttcaccgacacgctgtactgcacgatagacacctcgaagatgaccgaaagcgaaagtgagaaggcatccgcgggttcaatcagggccacaatcgagacagagatccggaagatggatgatcacactcactggcgctgccgcgcggtcactgtaagcccaagagataccaaccggatcagaatcgcgtgtcgcgatgaagccgaacaccagctagtgaagaaagtggcggaagcaaagatcggtgcgggagcccgggtgcttcgggacgagctctacccgattaaggtcgacagcgtcaagaggaccgcagtactagatgagaaccatgaaattctgacaggagcggtagcagccatgggtgaggagaacggaactactgtcgccaaaatgacgtggttgagcaacaaggaaatcgcaaagccctatggatcgatggtcgtgtacctaaccaaagggactgatgcacggaggatcctggccgatggatacttccatgtcggaggagaatccgggacaaccagtatttttaagtaccgaccacaaccggtataatgctataactgccaggaggttggtcataaggcattccaatgcaagaagatccagaagtacacaaaatacgcgacagagggctattactacagtcgctgtgatcacacggttccgaagtgcgttccatgcggtggaccacacgaatcgtatagcaagaactaccagaaactctacctatcacatcataaataggttactccggataatctagctaaatgtgaggaaacagggagcagtgcatgaaagcctaatgaacgacgaagatactcaaaacgcagtggcgttggcgatccaggaaccccaggcgaggaggattcaaggccggctcttgaccaccccgatgggacatcacaaatggaccaagatggtgccctccacctggagggaagggagatgggcaatccgaagcatgctttgggtcaatagggatgtggaagcggagcaagtgcggatcgagtcgccagatctgacagcggccgtgattcgacttcccgaacgacttgtctttatagcatcagtttacgtggaaggaggggaggcgtctgcgttgagcgacgcatgcgatcgcctgagaaaggccatcacaaaggtacagcgagatacagggacagtggtggagatcatgatcacgggtgattttaaccgccatgatcaactttagggaggggacgatatatccttaagtaggcaaggcgaagcagatccgattattgaccttatgaacgaatttgcactcagcagcctgctcaagcgaggcaccatgacatggcacggcggaggacacagtggggactgcgagtcgaccatcgaccttgtcttggcctcggaaaacttgacggactccatgactaagtgtgcaatacttgggaccgaccacggctcggaccacgacgccattgagactgtatttaacgccctatggccggtcccaaagtattaggaacggcttctactaaagaacacgctatagaatgagattaatactagaatcgcgagtaccctagccaccactctgtcagaaggcacagtatagtagaaaaccgatcgactaatatctacagtctcggacgcggtatacaatttaactccaagagcgaagccgtcgccacacgcgaagcggtggtggacaactgacctgacacaactgcgtcatatatatacatactggcgaaatcacgctcgttcggagcgacgggcggggcgaaaagtacctcggttcgaaaggatggcccaggacgcggcgaaacaataccatgatgccatccgtaaacaaaagaagaagcactggaatgagtttctcgcagacaacgacaacatatggaaagcagcgaagtatctgaagtccggggaggatgcggcatttgggaaattaccgcagctcgtcagagcagatgggactaccaccgctgaccatatagagtaagcagaggagttactttccaaattcttcccacccctaccggataacattaacaataaagggatcagaccataaagagagctagtagagataccggccatcaccctagaggaggtagaacaataacttcttacagcgaaatcgtggaaggcactaggagaggacggcctaccggcaatagtttagaagataatgtggcccacggtcaagtaccgggtccttaaactattctaggtatcgctggcagaaggctcgttaccaagacagtagagacacgcgaagatcataccgctcaaaaaaccgaataaagaaaattacaccattataaaatcatagagaccgatctcactcctagcgacactaggcaagatactggaatcagtagttgcagaaaggttctcacagtagaaacccacggcttactcccgaccagccactttggagcccggaaacagcggtccgcagagcaagcactcttgctcttgcaagaacagatctacacggcgtggcggggccgacgggtattgagcctgatcagcttcgatgtcaaaggagcctacaacggagtgtataaagaaagattgctctaaaggataaaagcacaaggcatactagagggtctgctccggtaggttaaggcgttctgctcggaacagacagcgaatatctagatcaataggcaattatcggaggttcaaagcctaccataagctaggctaccgtagggctcgcccctgtccccaatcctatttctcttctttaacacagaccttatgcaaagatagattgacagctagggaggagcagtcgcttttatggataacttcactgtataggtaaccgggtcaaccgcgcagagtaaccgggaaggaattgaagcaatcatcagagaagcgctcgactgggaaaggagaagcggagcgacctttgaagctgagaagacagctatcatacactttgctcccaagacgcgtaaatcggaccacgatccgtttaccatcaagggacagacggttgtaccccaagaccacgtcaagatcctgggcttattgatggacacgagactcaagtataaggaacatattgcaagggccgcttccaggggcctggaagcagcgatggagcttcggcgacttcggggcctaaccccagcatcagcgcggcagctattcacctcgacggtggcgccggtcgtggactacgcctccaatgtctggatgcacgcgtgcaaggataaagccatgggaccgatcaaccgagtccaaagagtaggcgcgcaagccattgtggggacatttctcacagtcgcgactagtgtcgcagaggcggaggctcacatggctactgcacaacgtcgattttggaaacgagccgtgaaaatgtggacagacatccacaccttgccggaaaccaatcctcttcgccggtgtacagatcagatcagaaagttcagaagataccaccgctcaccactgtatcacgtagccgatacgctcaagcacatcgacatggagacattagaaacgatcaaccccttcacgctatccccgtgggcggaacgcgtacaaaccgacattgatgagcagcatgagtccctggccgaagcgggcgggtgcatgcaggtcgcggttagcagctctgcacgaaacgagctggtgggttttggagtggccatcgagaagcgaccacctcggaatcggaagcttaaacacaaagcgctatccatcaccttggctgtaagggcagagcagaatccattctctgcggaactggcagccatggcacatgtattgagcacggcgacgggactgaaagactacacgatcgcactgctcacaagcaacaaagcggcactgaacatggtagttggagtgaaagattaccggattgcgctgctcacgagcaacaaagcggcggctctgacactaaggaatcctcgacaacaatcaggtcaggaattcgtctaccaactgtacaagttgatgagaaaactgaggagaaatggcaaccagatcaatgtccggtggatctcaacgagtgaagacaataaactgcggagtctggccaaggaacaggccagagccgcgacacaagaagatgctgtgctgcagaagcaggccccaaggatgaagtcaacaacactcaatattgcatggtcccaagcagtccccaacaatgacctgccagcgaatatagggagacacgcaaaacgagttgatgcagcactcccaggcaaacacacccggcaactgtatgaccgattatcttggaaagaagcgagcgtgctagctcaactccgaaccggcatggcaagactcaatggatatctctatcgaatcaacgtagcagacacggaccaatgtgcgtgtggacaagcgagagagaccgtggagcacttcctatttcgatgtcaaaaatggacggcgcactggacggaactactacaatgtaccaacactcaccgagaaatatatccttctttctaggaggaaagtcgccttccgatgatcagaagtggacgccaaacttagaggcggtacgggcctgtacagttattggaattctttaagagtttatcaagttgaaatgatatgaggtttgataatggactgcaatatggtatgttatagctaaaagagagcctcgcgatccgactggttctgacagcctagtagtcttttagacacctatgatgtgtacttggtggatacatgggaaagtactgtgatgtcagagcaaagtaaactccttattgtttcctgttccttccacttatacaaatagttgcattctctcgcttcacttcttactatttgtgattcttctcaacaaaaaccaactagtcttcgcctagatcacccgagatttgtatcctcctaggtcgtctgcccagcaatttttgtcatgcttatgatcttaaaatctatttattaactaaataagctcttatctttaaccactctgtgttttcttcaattattagtctttctttaagtttcctaagaacaaaattcagtaagataggtagggttcgaataatctgtttgtattttaggtacacaattgctatcttatatagtaaggcttctctgtcgctaaatagatcactgcgatctctgaagtgatttttaaggaggggcaactgtgctttacaaagcttcccagttatctttagggcgccgcggcaagtgattagacccagtttcattgccttagacaatattctgtttttgaataaggctgataaaatatattagctggctttagagccgtactaactaagtgaagactttcgcactctgttttacctataggaattctcggtatctttctcactagtgcgatatagtatggattcattctctcttttagaatgaacggcccgcttagtctgctactaggagaatgttgttcctaggttattttgttttaataagcctctggcatctagggaaacctctggaataccgatactacttgcctctttaggcagttcaagtgaagtagttagagataattcaattagcgcgacagaagacagaaacacagaatgatcttcattatcttttttccttagtataacagaatccattaggttttgctttagggctcgaaacggtatgataggcttccaggggaaagtttagaggagaactactaaagagagcgaatggatattcggcctttatagcttttggaaaggagatgggatctgcgtcattccaaatattagatgaaacttaaatatgagttgacaagaaagtaataccgattgagggatctgggtaagtcctatgtcgaatgatctccaagattgagaacgataaacgatgcaatagtacctcacttttcgcccagtaatattgtgatatacgatgggcgtttgccactcttttagcggctgactagaaaatgaacgttgcgattaccgctagccctccctaaggtatgctgtgcttaactgtattaacgtaattctaagggattaatctttggcagtaattatcttatggtttcattatattgcataatatcgatatatcagggaccgctaatagttcacccagacagagtttgttggtagaactatactctgaagggatctttatacagtggtagtagtagtagtattcatttacactgacccctcgcaaagcgatatgcagtatacgacggctatatatccgggtatgtacatatagattgatccactttctgacatgaacttagagcctcgtcacggcctatcgtggccaattgccgtttccattgttaggctgccctcatggcgcggctatagtggaattgcggatgagacggatacgaagtatccgattttggctgcatctctgttaggaaccgcgagaacgcgggcaaagcagaggctaagaatctggacagtgactgagttacagatgcggttttgttccgagttcgtttgattgagcgttggcttgccttattatcgagctggaacggtgacggtttattgtgaaaacgaagatgaagatcttcaattgtgagtatggggttggcgggaaggaaagggtcttgcactggaggagtcggtcgcggtatggatgtgacaggtcgctggaggacggaagcataggttgtttgttggttttgggacgaggaagtgatggacggtatcgtttgatgaggctggggagagtgggctgttggaggttgttgcggctctgggtctattatggcgggtagcggatgggaacggcagtccagattggtgttcaaccgttccttcgctgtagtagatggaatgggcgtggattgagtttgagactttgtactggagtcatctgtagtttgcgtactggactcggcggtaggagttgaccgtttaggggaggagaatgcggtggttgaggaggggggtttgttgggagttccgaggtggtgtttcaaatcgcacgagattatctgccatatgcagtcttcctcgtgtagttgttgcacttcctcgaacggggtgcattggaaggtggataaatgcttggtcgattggcaggcaaaacaacatgccacattgctgactcctgaaggtcggtaatagaagccattctgggccagttggagcggagtggccccagcaagcactattccttggaacgaacgagctcgggctgtgatggtggagtagtcgtaggtgattgagacgagaaagtaatcctcatcgtgagaatcatcctcgacgtgagaatcgtcctcatcatgagaatcatcctcggcgagagaaaagtcctcaacgttggggtattcgggtgagattgtggggtttgcggcttcgggggtgggagatggctggcttctcgtggtcatccccatggtccggtctctctatctctcgagtatgtccttggaatacagtacttctcgaaactgtatagggtacagtgtatagggtaccgctgcgatacagtacttcccgaaactggtgtcaccacttgcactcttcgattgtttctcaaaccctaactgccaagacagactagtctatattgggagttattccggagtatccttgttagtgggccgtgtattgtttcttacatagagtaatctggatatttagccgctgtattaatctgtaagtcgacctaattggcaccacttcggaagccttcgttccttcggcgagaaaaaggtcctcaacgttggggtattcgggtgagattgcggggtttgcggcttcggggatgggagatgggcgacgggctggggggtctggaagctgagggttcagccccacccgctggcttctcgtcgtcatttccatggtccggtcctaatggtacagtccctaacctctttatacagtggcggccgttaccgccttccatgttagaacagagaattggtcttacaaaccctagtcatgggataccctaaacctaatatgatttagtgtaaacagccgattttgtaccttctaggtggcaatacaaaggtttttgtttgaccacaaagattgtatttgtgaggtctagaggccctgattttgaagctgccaatctgctttggctatagattatatgctttcaacatggcctttaggtcatgcagcaaatgttgagagtggagatattattggctaattgacataacccttaagaaaagttttgtagtgagttgttagactagaatgcccctgctctagatttgttagtcgttttcttatacggtccgccgcatagagctggtttcaacccattggcaagctcttacaggatcaatcgtggaacgacccaccgcaaagccccgtctggacgtataaatagctgctctatgcctatgtcaactttcgtccacagctctatatactggtgcccctgacataaatactattataatatagttagaatttctcttgtcactttttctaagtattattatcgcctgagctggactctccctagtacggacggtcggtgaatttaattagagcctctgccaagccagtaataacggcgaaatgacctgtttctgtgatagcgacaaacagaaccagagcactatcgacttgaatgactgctttgttaaccttgatggagatctgagcccacgccaaaagtatgcaaaggcctatccgtatactatatatctggttatatttctgatgatatactaaatccatacagtggtggatttatggattcatgtggtggaataagttttatacccgcgcttccaaccttgcaggcaacctgtaaaccaaacaatcaaatcacgtctattaatataggtatgtttctctctacttaagctatcatcgttagcgtaaatgtcataaaggaactgaccataagccaaaatccaaacagacggggttttcactttcaagggtaataagttaacttgttccggctaggaatggaataaactagcaatttgttacagggccagacttgaagctatagggtccagctataaggcccatatgtttgatggatgtctgcctttattaaattaacggcggcctatatcgccttctatatcgggaatttagagagtttttcggaccattactacactaaccgctgagacagatataaatagcgcgtggtattttcgtctcgtagcctactcagtaataaataccagaaacttatctaccgattggcatggaatatataagaaccaaagttagacctgggtgatggagtgattacaatggacctgtgtttgtactgtgggattcactcttgaaacggatccataaatacataatcaactatatatggcttaccatatcatgtgattagggtttgaaagagctcctttatattgtttggcatggaaggcggtaacggttggcactgtatagaatgtaacataacgaagaacatataaagcaaggacgagcataactctggtcttctacaaccgcaaagcaaaaatatgattcgcttcatccacgtaacaggtaggcagcatggagttaccgcgaacactgtacctcaccaaggccaacttctagagtagaccatgaagcgagcgggcattttcagagagtgctcagtgtcacgggatttattatcaggatgttcgctaccggtcccatccgccctggtttcgaaaggaacttgtttatatgtgagcaggaagcaaggaactaacctttcaatgaggtgtaatataacgcctacagtaggttggttggttggttgatgctatttaccctgaaccctcgcacacgaaagttgaaaccctgggttgaaatacaagtgcgataattgatctatattgaaagatccagccacttgtagttgcctcatccccctgctgcctagcggagtggctgcctaacaggtagatctatacagatctatatacatcacatgaactgagatccaaatttacatagcgaggagtcaggataaatgaaatccatccatccgtctgtaactaggttttctttgtagataactagggccttagtacaacacgcctaggaaagactttattgcttatcacctgggatgagatacagagtctcgaaagatcggtatttcgagaactacaatcgcaagctgaatcataatttctgtaagtttttatcatattccattgtccagccattgtttgcttgctgttgcccagaacgcaagactaagagaggcgaatacactcccttctatttcactgataactcgccccagtcttgaatcataaatcgatagaaaattgtgatatttccaaattttctgatatgtctaggtatgtcgcagcagggttgtctgcttttggttaggtaactgatcctatacctctactagacatattaattcgccgaaagtaaaatcggtataaataaaagatgattgtaaatagtaaactagtaccggaaatactccctaagattaaagccattctatggctcaataagacctgggatacgtgagaactgtctgtcgtaaattcttctactatattttttgtggcagttgtggtcgccggtatcgttttagttaaatctataagctggcctttagtaatcggattgagtgtacttaagtctgagtcgtcgaatttagatgcgtttcgtgttatttatatatactgataataataagaatttctaaacaaatatgaagaatatcctagattcccggttatataactaccgatttccttttgtttcgaccgagacacagcacctaaagttcctagaagtataactctattggagaaacccactgaagtttggctagaaaggctttagaagtctcctgttaaagataaagactttattaaagtaactttagccggctggtacaaagtggcttggtctgagggaatataaacgataaattcagagcttcctgtaaaatcatggtcggaaccaactgaggatactgtatattgtgataatctcgcgctgctgttagctactttcgcgaactcatctttacctaaactgaaaggtagtaatgtacgagagctctgctcttcaactattagtctgctgccccctagcttatcgttaaccttgaaatattcgattataccgttttccttttcactggtagtggtgtgagtgccaggatatgtgagggtaggagtatctatatctgtctccggtggaagtgatcgaagcggcgaggtctaactttaggttgggctcgaagggtatagcgtaatcgattatagaaagcttatagcttttggagccttaatatcagacgttatgatagtattagataaagttcgctgtgattggctataaaaagatcttagtaaccatgctcttttaaatctagctaaatagactagatagaccaacgcttttggtataaaatcctggggttctgaacccagcattgctttctagcatttcttgggtgatagccttatgctaacgagtttggacattccaggacaaattgtggtagttgaaaagtcagcctttgctaggaagaaacgcagactaaataagcctattgtggtatccgcatttttcgaaccgtatggggtcgatgaatagttctgccgggcttttagtgttacactgccaaagggtacactgccatttgttcggaaactgaatccgtgtctgccattcaataaaactatgtagtttgtgggcgcccgaatcaagaacactattcagtaaggcctaacatagcgggtgacgtgacccctcaaattacaccttgtactaaccaccccgtcatttagccttcgcccttataaatgtattcggtgcaggtggattcatcgaaaatttggggcaggacaaccactgaagcctttacattaatgtcaaataatccacacgagtgaaaatcaactacacttggttctagatgcagccccaatccattagtgctcaaatctctgcctatctggcgcatttgatctagtatatgcaaatctatcttcatattacttgaagtacgctgaaaacttaatgaatcgccattttccgggttttcataaggcccaaagtatataaaaggtggggcactgctttgacatggcttgtcgatatctaagtttattcaagcccttatttctcggcggatggttctcgtgagagttgatgccctcaaagcatgctacaaactatcgctatctaggcgtaggctcaaagcaaagaggaaatcccgctgcttaattgagggtgttactttctgatgggttgtatctcgcttttctgtttgaaaatattagttggactcgtttgggggatatctaccggaatagcagatctcgttgaatattgaggaccacgaactgataaagccctctggtatcgttgtacgtatcccgaaatcactgcagcgggtattttacctcgtcagctacaagtatagccctagaagaaatgtcgattctggaatttggatacgccttttgttctcataccataaagcaaagcgctcatgctgcctttcctgaaaccagtcatttggttcatcttcgtggtcattttttctctggttagtggcttttgttaagctactgggactgatggataacctaattactctagacattcggtcttgtaattcgctctgctgagtataaaagaagtgtcagtgactctgaggatattgcgagccggggcgcttgggctaatagaaatgaagccaccttcgttaggcacttctcatagtcggtcccagagatgggagctctctgatgcaagccgtggtatgtctcatcaggctcgtttactgaatcatcttatcaaagttattagcgcctgccatccaccaatctaatcgataccacactcaacatcgacggcgccacagatcgcattagctttgacgagtgaccatttggtaacctgggcacagagatcattaatagttcggttccacttgtttacctttgagatggcttaggtatataaaaagatgtactaagtgaaggccagtacaagattagtagcaagaaaatgtgtagaaagcatagatgagccaactataataacgaagaggacgattctatcgtgggcagtggcgtaggtaggctgtactagggcaaataaaatcatccatccatgccgtacaaatatcgtgtaaagcattttcgtacgatatagtgggattgctctaggcttcctaggtagtgaactgcgagtctcatgtgataatccctgaaaaggctggaacattccaaacaatcatgatgagccccaagcccaatacatggagaatgaccatagttaatctgcacttacaatatcgctaccggctctacacaatgtatataaacgtattcatggccgcttggctgtccacatcaacgattttctaactaacaaaaaagacacggaccgcaattccaactatctatgcgtacaatgatggctaatgtaatatgcactgttgtatggtatacacggtaccagtggtcacatgattttctgggtaccttaccctgtctcaaccatgtattcctagttttcgacatatcatgcagaacctcgtgaagtatgatccacctctatttaccccaactaatacatacctcatatagcaggacttaggacccttgactaaactttatcgagacttacggcactacgtcacgcctactcttagaaacccaggcgcacaaaacagcttatataagtataacgaggtccttagtgggttggtttcttatagcgataagggggtgctataattattttagtaatatccagtaaatacgacgccacacttcctgtctacttcacctttcttaatgatttaataggttccgttaaggctactaataagaatccgaaagcatctgagtcgaccggccactgatttaaatcgttaactccggtaattccgatatccttcttgtgcttttgtataagcgctatagtaattctaggaatagtattggcgtatattgtgtaggtctcagtcggtaagtattctgagcattaatctaagtaggctgtgagaaatgtcagcggcgcactcactcgaacgagccaaggactaaccaatctttactctgccatttatactgagtagtattccaccatataatagtgactgatacgtgagtttaaagctactaagatagtataggctatcgagaatcttgtctgttagtttatcgacgaaaatggagacgataagacttacctgtgatattattacagctagttctaattccgtaggatatatatttagagaggaaataatattccttaaagtaagtaggaaattattaacgaaaatatatatagagtttacgtctatatagcagtctcgagataagaggatattagtataatcgagataactaaatcgttgaattagtcttttagcatctgctttaagatactctcgtacagcttgtaattgagatagattagaacaaagggtcactataataacttcccctgcgatattgtataatagggctggtcgatacttattccagggtgactcttgcctcacaatcagcaccgaagatatatccccccctagcctataaagctaaggaagacgtaaggttctgagaggtccctcgatggactttttcatatgctggtgacgtggcgggcaattcctctttcccaaggatttgtattcgggacgtgtcatatcttctcactaagacaaacaaaaatgaacctgggattacagtagccccggtgggtgctggtggcttttaataaaatttacttttcacagatgccatgcatgcaggtcgccttccgactttactgcatgtctgggaacgttcttgactataaaacttcctttcgggagcccgtcgccagcctggttccagtagcccgaattacaatagtttggaccgctctcaattctaaccgctctcaattccaaccgctctcaattccaaccgctctcaattccaaccgctctcaattctaaccgctctcagtctcagccgctgtcggcttggagtgctctcagtttcttgactgcactaatgatgacctccccaaaatagtctcaaatccccggataccttaccttgtgtttggcacttctactagcaatactataacaggttgaattgagctgcgtgggggattgccacatgtcaaaagcagtaccagtgaaagatgttaacttgttttagtgtaattcaccaactaatccttacgattagttctaaaggctactgtcctaggctgggtctagaaagtctattacagcaactttgtcaataagtgagggtttgaaaatgtacccgaaatacggtctttggctacatgtacactggcgagcagaccacactcaagatgcacgtcctacgcatgctacctgtgttatggtcgtccatatttccaaccttctgccaacttagaaagatgcagcagaaactcttctctacgaaagtgttctcaagctccgttttccattcatgaggcttgcgattacttgtgtacaaaaattgcaaacacccctcagtttcctcacaaattttggtgttggctaccttgttatatagtatgacaaagtactccatagttcgttgcaacgccccaaaacagtaatcgctggcagcttcggtattagtctattagccgacttatgggggttatagttaggtggagatttgtggaccataggctgaggacgttgttcctacatgagttagagacaagacgttcaagtggccaaaaaaagaagcaaattcttactatttcctgtttagttgggatagcgatatcagggtaagaatagtaggtatagaggcggccgtttggtatttctataactacctaacttttgattaaatataagtgccagaaatcattgtgataacgtagaagattattacagcgcttacgcagctattcctattttatatagcgcttgcacagctgctcctgttttataggactcttaaccggtactatttagaaacccgatgttgtcgaactgcagcaacaaggagatagaaagaagcggcccaggcctgttatccaaatctggatttatataggtagaaccattgctccagacacgatggtgttgagtgacatattgctttcagagccctctaaaaatgccctggtcggttaggaatcggtcaagtgtgttcgttcgtccgcgatcgtgcagcactacaagcgtaccaccaataccgaaatgagatggaatttagattcctcaactttttgcttcatctgtcaccaagccctgcggaaaatctgcattccgtcttgttgcaacaccaacagaaatcgcaaacgtaaatctaagtaaaccgcaagtcctatcaaccgctgcgtctcctggagatataagattgtagagataaataagtcgttttcccattcacctcatacgcaaaaagttccacatattcgtcgtcgctacgcttcgaggtttttcataattcgtatccctaatttgccaatcagtatgtattataccatacatactccccgacgaggggtagcacggactaggaaagaacggctcaatcacagtaaggcccccattacatggcccgccacattagtataccgacagtctttaaagggttactagggggtgtttctacgtttcgagagagcgtccctaagaaggtacctttccgcgctcagtaccttatcctagaagcagtacaaaaaatattggagcaaagtggattccgctttatccaacgctagctaccccaggtgtgtcggtcggccgagtgggtttatacagagtcaatagagctgcacagactcttcccatttttgaaccaaaatagaaaatacgcatctttaaaagattttcaccagatattggctaagcttcacagcctaaggcatatagtatccaatatacgccatacagcagtccatagaatcgtttaagatagcgaatccttgcttgaaatgcttcaggctgctattactttcgctagctatataggcgataaggaatgtacacagtaactcgaattcctttacagtactttaaataatttactggttcaaataaataagcgcttacaccatcttcagcagagggtattagttcagatttagatatgtcactcccgtctagtagagctaatacaaaggtgtgcccttcttctaacggcagtctgaaggttaatagaataaagcgaacacatgtttaattcataggtataagatattgtgagaaggtaccaattgttatcttgatatgaggcaagcaaccaaccccctgctttacaagtctcctgagtgagatcttgtttcaagccagcgataggtctgtcatgtcacgtgatgtaacacgtgggcgacgcggcaggtaaagaatgaccctctgcgaacttgcaactgccatccgcaacgcttgtgattcaaaatgtccactgagattgacaaactacgatgccttttagcagaggaaaataagaagatatccaaaaccaaccttcccgcttcccttaacagtgtccctaaccacttcttctatagtctcgcagttcaacaggataagacacaatctacgcgtggagatcccgccaccgtaaccaataaaccgcgccctaaaagacttaaagcctctggctctttcgcgaaagaacaagaggacatttagcggttgctgatgaattcttcacttctcttcataccctggaagaaactggagagacaccgggggcagcttgttggctcggaactaaaccttaatcgctttcttcgccagaccatagaggactatatttcgaaaattatcgaagaactctacagcgatccaagactgcgacagacatttaggttaagaggatcgatacgctttaagaaccactccaatatactaagccccgagtgggaacttgaggagcgaatacagaatatcgatatttatggtcggccacgacgacgttcaccgcgtccagctgcccgagaataaagcgaaccaaggtagccggagaacctaggctccggcgcgaagcagccggcctcgtgccaatcaattctgcgtctataacaaccccagccaatcatccgaatcgatccatcgcgatgcagctaatatcaaatagtacaaatctccgcataaggtgatactgggccgcatctatgaagggctggaggatatggatattaataaggtggctgagcaacaagatgatgagttcccgaaacttccgttccgtcgcgcgattgctagactccttgtgcagccacatgactatattattcgtgctggtacggaaattgaggtactaagtaccggcgaagctaatatttatctataaattagagaatcctaggacgcttctatactacctctctgttctatagggagacgttagggacttcaccggctggaacccccaatcaaatggcccaaatcgtctttattttaccaccgtgggagaatccctcgccttcactctccaggcgcttaagttgtggcctcggtatcaagcttagagataaaaagcaatcgatttattgctaagacgggaagtagtagtagcaggtattttgggcagtatctgaggaggtactgtcttccaaatatcggccaccaaggacaaatgggttacttcgaatctccgatataacggcgtcccaggcgaaacaagcccggtattagtggttgccagctaatagacgtacaacgagatgcagacgaggactaatctaaccctgatacgccgagataggacctacatatatagcgcaatattagatagggacagccaacgtcaatccatatggcaccagcactagcttcgagggagagggggtatcaccggtattactatacgttaaagtgtctacgcggaacattgagccggggagagctagatcaggcttaccctaatgtccgtgaccatggaaagggcaccatgttataaatgcaaccacttgcctcaaacggttgcggcgtcagttgtttcagacagttaatgcagattgtgaagtactgggcattcacggttctcggggtgctcttttgaaagttacgctatctcgcacggatataatgtacctgcaaaatgcaccgtaccagagtttgcggaacagtttcggcatgaagctgctgtataggacaaacctctttaccttggaagcatcgaattggctcatccgtacagctacgacggtgccgcatatcttgaacatatgatgttattgagtccgggaggacagcctgtcgacctggcactgaaggaaatgagtcgagattgcttcaatgccaagatgaaggaatcgctctcagaaatgcaccttctgcatgttcttcatagagatccagccccgcgaaattggctgtacaatccagaaagcaaaaaggtagtatttatgattttgaaagggccgagatgatcctggggataacgtcgccaaatcggaagcggatgccacgtgatgggattgtttttaaacagagcagtgcaggcattgtgaggtcggaaggttcaaacgaggatccagtaaacgtagtcacgattccagcgatcacgctaagtaacgtagattatgctcggaatcttcgtgtcaagaattcgagatgatcctggggataacgtcgccaaatcggaagcggatgccacgtgatgggattgtttttaaacagagcagtgcaggcattgtgaggtcggaaggttcaaacgaggatccagtaaacgtagtcacgattccagcgatcacgctaagtaacgtagattatgctcggaatcttcgtatcaataatttcgtatatttacgcttcgtagccgtcggaaattcttttttttttccttggattgaaaacactatcatctaatggcgaattacattctatgcctaattacagccgtacacggatcagatccagcgtgtggtatgattaattcgtgagactttccactgtcgtttccaaatctgctcagcctgggcttctcgaattctggattgctcaagagcaacacgaagtttgcggactgcttgaaacacccgttcattgtcaagcggtcttgcctctggctcgaagtgatactgcaacgtcaactcttgggaaacatcaataatcgacattgtcaaattgagaagattttcaaaacaagaccgataaaactgattctcgttctcctgttgatcccgttgacaaattctttcttccttcaactcttgaagtgacaggcggtttcgtgactttgagcacttcagacgcgttcgggtggtttccaatgccatggtagaacctcgggccagtgcaatctgatgatccagagaatttatttctggtaggtcgtgccgaggaggaagcatcattggcatggaactcaaaatgtctttcggagattccggtgagcgactgtaaatacttgaggcatcatctgcagacggatgctgctcaaccgctttcaatggcattttggacagtatgaatggcggcatacgtttacttcatacctcgactatcttatatgtgtgcgaagaaccaatccctgagtaggcgcttacaatgtaaaggctgaagaccaatccagtgtcattttcttgcgggtcactcactcattttgataaagactccattttcacgttgctttcgctttgcggtatggcggaatattgatattcggaagcatccttatttcggcggccatagtcgaggaagataatacggaaataagatacaagatcaacaacaaatatacagtagaagcacagatcaaagaaaacgcgatgtccagctaaagcgttctatacggccttcaattgaattggataccatcacggggcagcatggggcggacaacatcagtatccgtttctgtaaacttaggtgaggggcaaatgaaaatcatccatccatcctttcaagagaaattggttagttgaatgtggttgactgagggagtgattggtttaaatgtggttgattgaagagtggttgattgaagagtggttgattgaagagtggttgattgaagaatggttggttaaagagtggttggttaaagagtggttgattgaagagtggttgattgagtagtggttgattgaagaatggttggttaaagagtggttatgtgaaagagtggttacgtgaaagagagcttagtgtcatcttcgttgaatcagctagactaacactgtatacttgaccctgcaaaggcgcaatactgccttgtaaagtgatatacggtggtcctctacactatcctgactcctaactctgtcttcataacatatatttcaatcaaacatttcaattatgcgccttgaaaccccttccgtccttggactaaccgcatctgctctgtggtcagttacttactacaccacaactgactgttcaggcgcggggaaagaggttggttggaggttacgaggctgggtgctcgactctggggaacagcatggaatcggtcatggtctctaccgatggtgtcaacaacgttaccttgagcacgggtagcaactgcaaccctctaatcccaagcggtgtaaccgacctctgtgtcaatgccgctatccgttccttcttatctttttgatcgtaagtcatttttttgtgccatccccaccgcaaatatatctgcaaattaacattgcaaggtttattaaagccctggaaatgcgcggggtgggtgttgatagaggctcagccaagaggtcaagatgggcttctagaaactgcgtgtcattttctctatatatagatctcagttacatgtatccagacgcctttgcaattttttccattcgagaccattgtagcaatctccaccggagaatccaaggaaagttgcgctcgcagttagtttcagcatattgtccttttcttgttacgcttcagtgtcatgcctgtttttatttaggggttggtggtcatattgtgggccacaacgatctgtcagtaagactatttgccatctacaaatagtaggtatatccctttcctcatcgacaataccttcttctcaaagcttgttgggccaggccatcccatcagatacatccttgccactctttcaccatatactttatcctttttttatatatactaagcctagtgtggctagctaatgctacctatattccctccttggttaaggttaatacagctgatattactactcgtggcgttaacggatatcgttccgtcgcatactttataaactgggtatgaccttcaaccacatattccaccataaaatcaaataactcaacaaagtctgtcagggtatcttctaaccttaggacatcctagctaagaaactaacctatattctctatatatttgccaatgtcagagcctctggtaaggtgatcctattggacccttggttggacactgataagcactaccctactaattcctagaccgataccggcaataatatctatagctgtatcaaagagctttttctacttaaaaagaaaaactgtaaacttaaggttcttctgtcgattagaggctggacgtactcttccaaccttaggctggcctttgaaactgaagtgggacgccagaagtttgctggcagttctatcgagttactaaaggacttgggcttcgatagtattgatattaattttgaagtgagttttccatctcgttcacggtttttgatgctaatgtcagaagtatcctggaaataacaacgaagcggaccaatttgttgataccctacgccgtcttcgtgaggtattttcatgcttcttttatttatgggtctgtaaaactaaacatattcaggccttagatttatatagttccgctaaagtagatagctatcatttcttacttaccacttcatctcctactagtccgtatcattcgttcaaactcctcaacaacgctaacctaatttataggccctactaactacctaaaagagtatcttacccagatagatcagtatctggacttctggaacctgatggcctacgattacgccggaagctgggacactgttgccggccatggtgccaacctgtttgtatctaacagtaacctagccagcactccctttaatacggaccaagcaatcgattactatacctcacacggagtggcctcttccaatattgttctaggtatgctgctgtacggccgggcgtttactggtaccagcggccctggctaaccttataacggtcttggtgttagtggctggagggatggtgtatgggactataaagctctatctcagaccagctgtgaggtcgtaaacctagactaggaagctactaactactactataacttggggtcgcgtttattcatcagctataatacccctgaggttgcgcgtaaaaaaggtgagtatattaaatccaaggggcttggtggtagtatgtggtgggagcttagtagtgataagtaaggtaatgagagtctgattaccacggtatgtttcttagtccactcgcatttcattatcttacttactttaaacttgcaggttataagtactcttagaggcactggtgctctggataagagcgataatcagttgagctatcctaattctaaatataacaatttgaaggcctgctttgagccttgatcaacttgcttgctcaataaagaattaaaggctggcagctggtgcattgcatccaaagttgacacaataaattcgccctcgcgctcatctacctgcactccatctaccaccagaattaagttctaactagtgcgagataaaataaaactattgcctttcataacagaaacagaaactcactttctcaaacaccttttaatatctgcttcagattttgtattgttggtacgtcgacacatttcagcttgaaggtttatcctgcgccaaaatttccacaagcagaggggattacaatgaacaatacaaggaagcctgcacactggccaagggaatcactatttgtgctgggaagaataagttgagatatcttgatagaattttgaaatggacggcaaaggagttggtcaagcacagaagtagtagtagattatttcattaccctgtcccctcccaagttgatttaaccactagaccaaaatacgaatccgtacccagcctagtgggttgtggtttagaatccaactgtcgaaacgatatgcagcctaccgctactatatatatcttcctatgtacatgtatcgtgtaccacttcctaagcgaacttggagcctcgccgaggcctgccgtggcctctatgccgtcgttgtgtttatgctgcccttatggcgcgcggctttgaaaccgttgcgatgcttcagcaaaatccaagacagcctccactatcttggttcgtgatgcactgtcaatcttacctcttccttcttctcctggacactgtacagtaagagtcgaaatcagattcccctttaggcacacaccccttgtttctcggctcgtatccgaaaccacgctaaagaaatgatttcaacctgctcgtaagaatcacctccattccgagccctcggaggggaccggagaactttcaccagtactaaaggacctctgaacgtcagcctaccaaacggccaaaagcatgttaaagtcattggtgcctaaggcatgaatccactcgagccaagggggtgagtaagctggtttacttgagggagataagagaataagtgccaatttacagtgtgtgtgtatgtgtgtgtaattcatttacgctgacccctcgtcgaaacgatatgcagcctaccgctactatatatatcttcctatgtacatgtatcgtgtaccacttcctaagcgaacttggagcctcgccgaggcctgccgtggcctctatgccgtcgttgtgtttatgctgccctccatatacagtattggttttttatgttatccttcaatacaaaacgagatgtaagaaatgctcattcacctcctgcatgatgcacacgtgtagcttcaactatataaggcaagatatgatgtgaaaactttccggcatactgtactaaacctgataagctctaattaactagcctgcggctcgcactggcagagtagttctatctacatcagatgactgtagatttacaagagcatttgcataccggggtagacgtgagagttagcgagtgatctacaaggggtgtcctagtagccgatttaccggctgaaattgaagccaaagatgaactatctgtaggcgtcgacgtgaatatcggggttggagattgatcagcacggagcgtctcagtagccgatttaccgtctgaaataaaagatggactgtccgtaggcgtcgacgtggatatcggtattggagattgatctacacgggctgtttcagaagtaggcatgccgattgcagttaagaacaaggactgactgcctacagagatcagcgtggtcgtctaagaggaacctttattaccaatgctacacctactaggcaccttaagaccgttttctagcatacaactagacgtatctccctatcgattaaggaaagatacagtgccgtttttgttaactgtcacccaggcaacctactctccattttcagtgccatatatatcaactttcaccgacttatcgtcggaaccggtaccaatgaaacctaaagagtgttaacaatagcgtgagggcctttgattcgaattggatactcacccgagcaatctttgcctttcagcttagcaaaggttgctgagtagcctgtacagccgtggttattctgagaccacactctacagttgttctcgctgtcattgtcctcaataatagccaaataactgcctgccacaacattcccgataagtaaaaggcagttgaaggaacgcatcctggactatgcgcggcttcaaggcaatcaagtgcgatgatggtgacgactggctgggaccgaggattatttattcgacactaaattgtgcgctaggagcgggaacgaagctatagtagataatagagagaaaattactaacctcagaaaagaggtaacaagactgtctagcatgccacagattaaagagcaaagcaggggtaggtcgtccaagtcgtggtcatcaaagaacatacgttaaggcgatcccaagaagcaattcgactactgtagttgggcccgcaatttctgtttgcccctagcatgtttccttaccactcatcaattatttgccctgcaaagtatgtatctaatgtttaatgctcactttatttcgatggtgcaaagaaccgtctgtaaatttagtgtcttcaggtatttacattaaaccggaaatgtgacggttctttacagtgcgtctcgaaaccggtgcaacaaaaagcgctcttcgacaatcttttcggccccactgccaagaccttagcgcagatcatttattgaggttaccaccacaccgagtttaaatttgctgcggtagccgatcagcagtacagtaactatcaattttacccgatatccaaattatatgaaatatttcaacgagggggaatacaatgctatacaatattcattatagagatcctcaatttagtccggtcaccttaataaatgatctgcgctaaggtcttggcagtggggccgaaaagattgtcgaagagcgttcttgttgcaccggtttcgagacgcactgaacaacaagaatgaggtgcgtttctctttttgcattgtgattatcaaatacactgccaggtggtgcactggcgcccacgtgaagtccagtatagacaaaagagcttttagaacaggtacagtacaagacaacaagtccgctttaaaatcacacttgttcaacagttgagacagcgcaggtcaggacgcatactgtaacccgctacactggcagctccttgtataagttaattctttttgattcaagcaagttgaatggagaagacagagattcggcatatttattgaaaggcactaatcgccattgaggtacgctcttcgaagtccatttctcgatactgagcaggttagcaagataagaaaaggatatttgatcataagtctgcatagacgttggtcgaatcccaacttgttctcgacgctggatagcttctgtaatggctcttattaattgaactattctcatatcgcattactgtgcggtcaacatgccgagggcagataaatcctagagcggttaaagttgggtgcggtcaaacccaacggtctagattatcttaattcaaagaccacaactacgtaccggtagacccttgagagtcgaggctggttaagcttgggtgtcatcaggtttaatcacgtttcatgtcgtgaatgctgaagagtgctcctaatcagtggcatcttagaccaggtaagcagtatttttcattctatatcgtaaccacttcaacagatggccacgcgctaccccagttacatgtaggttgacgaacgaccagaaaaagccctcacataacccattcgacatctattccctaatagccccacccctaccaacttcaattcaacgtttacaagctcgcttgctggcataggcaacatgtcgaggaattccttcgctattacaacgagtctgttggtctaaggaggatcgcagatcagcttagtctgcaatatatataagggaagacttcttgtgctctaccttgcctttcaccatacatatgtacttgatttcctctgccacttcttggctttccatttccgccttagtgctcagtccttgccgctttttgctcactgagtagaactgagcacgcccctaagtattacataatcacaacgctcgctcactgagcatcacctgatcgttacataagctggatgactgactcatgactcactgagcgtcacctgagcgctctgatttgctcactgagcagcctgatcttacttacaagcttgacctgagcgctctgactaactagctcactgagcacgatctgattattacataagctcaaggacttcacgtattcggtaagcgagctgcgcgcgcaagccagctgcgcagcccaaaacacatagtaaaagtgatgcacttgtcatttatatttcaacaaccaacgtttttatcatattaaatttcttgccgatagcaaccgataagcatttttagtgttatatagcagtttcgcctagatcaaaaacatgcattgtcatggtttcaaaaaatacatcgctacttccaagaaatatatatttatcgatcatatctctatcaaacacctattagattcctataaagtctagataatagctagatgtcatataataggctataaggaaaagttcatatacataaccgttgttgcaatatcatattgtaatttatcgcttttaccatgtgttttgggctgcgcagctggcttgcgcgcgcagctcgcttactgaatacgttagttaacgtatttcactaccgagtggccacaaccaccgagcgaccatctctaaaacacatagtaaatacaatattttataaccttatatttcaacaaccgcgttattatatgatttaactctcgttagatagctattgataaggattcttaacgctatatatgaatttcaagaacactggaatgctataatatcatggtattaaaaattacgttactcaaagccagaaatatatataacgcaatcacaaagtcataaatattttctaaactccctagagaagctatatgtcacctaaaaagcattaggctattaggaaatctcgatatagactaccgttgttgaaatatcatgttgtaatcaatcgtgtttactatatgttttggagatggccgctcggtggtagtggccactcggtagtgaaatacgttactcactggagcaaagcgggcgcggggagcagctaagtcaacagctcacctcaataaaatgcaccacgctagccccatccaaatgcagttttattcaccagactcttgaccattgtcccctcaacgaaaggctggcctcatcaatttggcggtcgatcctggttatttcgcctccagctgagaggccatttgatagtagggctacatttattggttttactattttgcggctatactactattcaactcgccgagtctcgcattctacaatactatctctacatagttgcggaagatatccagccctcaaattttggttctacaatctcagaagaccccaattaagtggttcgtaaattcagtgtagtgttttattctcaaaattttgtcattatttttctttcccgcttgaataacaccggcttatcgctcttactgcctacccacttgctcctaggaataccacttcagctaaaaatattctagaccaatcgatcatgtctactgaatggtctagccgcccatgacgaaatttgcggcccctcattcgcccaacatattcaaactagcaatcagaaaatatattatcctagctgacttcctaggagctccagatctttcgctgtaaatgataccaatcctaggagcttaagtgctattcgcgagaaatatgactactaatgctaagtgtcaaagcatataaataggaccccgatccctccttaaaggaaaatatcaggtttcaagcatttctcttcaaggtcccgtaaagacttatcataagttcaagcaaccaccagcattctagtccatcttttattaggcccttagccaaggcaaaagcctaactattatacagattttctaataccgcagagaaaagcgataacctggtcgacatctaacatttcccattcgataagagttataagacagtttcctacaaattccagagctctaagtttattatatatggtcaagacctaagtaggaagatataagtgactctcattataccagggggagcgcgagagtttacaaggggcttatggctgactaaattcagtagtataaaatccactaaaacctaagagaaaacagatccaagctttatttaccagtctaattacacgtactaaaacccactttaattgcacatactcttttatcattaagctagacgtaaggagtaaatcgggtatggtatgcttccaccgattaagctagactaacctcccacgtaagcgagcttaattagtgatacccattcttctctatgaattgccaggtaccgctatagactagactgcggcacgatccacaatatccgcggatattttttgatatccaagatccgcagccttgcggatttggatatggacctcatgtccattggatatttgcggatatccaatggatatcaaacaatacaaacatgcctagactcgtgacctcgaggggtgtgcattaattttatgttttcctctgtatttttcgtgtaatagtatgttatgtcaaataatcaaaatctggatcttttgggggttgtatgaatttaaatcttcttattcattcatatatactatttatagatctaactgtgaagggctacggtcgaattgagtcaattaaacggcgcctgtatgctgtttagctaaagtttaggagttttactatgtaggaactccacgatagtgttatacattcttaaagttgtagggtggtgagcgccggtagttcctgggccccagcgcctattctctgacctcggtcagaaatcctcttatagcaggggtctctccctcttttatgaccgtgttcagaaacttgggctggggggagactggcagcgtgcacgggtaaagcccgagctctaatactggcactatcccattatactaactggaagccatctggtagccttggctgttttcgaatccgccctgaacggcctggtatgctcctatccaccggtatctctggaagctcatcatcctcttcaacagcgtcgtatggtcgtttttgaggttgttttccttttacccgtctacgtcgctcggcactatcatcatccgagtcattatcaccgctctcagtgtgctgggtagcctcgagtccagtctcttgatcctcctcctcgttatcactgataggctccaagacctcaagctgtggtaatgatctccgggtttgatctagcaaagcagcttcaccttgggatagatactctttgataatccctagctcctcatgtcgaagatcaaagttggtagcaaactgatgcagcatcaggccacggattgtactcggcttcaattgaccacgacggtaatgacagatatcacgagcacaattgaatagtcgttcaacaccagcaccactagcagggatagatagaatgtcccttgccatccttgccagggtcgggaagctctgctcatgttccttccagaaaagtcgaggtttctgtcgctcagttccacgagcaagatatcgtgcaatctcgttgtcatctggttttgcaagctcttccaatggctggttttgcgatgcacaagcagcatcaagatcacagtcatcattctcatcaatggctactccagaagtctccagtgccgctaggtcattggcattataggtaagcatcttcctatatcgatcaaactctcggtttaggacctcttgataacgattcacataatcaatatcgccctgccaatcagtcgaggaaaagtaccggaccttctttgatggagagaagattgttgctagagcgtagatgtcaccataaggctcgtattcggtggcagtgtagtacttggagagctttttctttgctgtttggagtgcccgcaacatccgtttcttccagatcacacctttattcttaagcttcgcctcggctgcatcgagatgggagaaaagcttgttgtagatactgtagatattgtgtgcggtaatatccttggtctttgacagcatcattgtgaaatcaaagaagggctttgtcagaagaagaagatattcgacttgacgccactcttcttgatcgagcttgaaataaagatattgatgatcagtacaatactgatcatagaatggctggagcttcttggcccggttgagcatcagaaatgttgagttccatcgtgtccgaacatcttggattggaatcaatgcaggctccggctgcagggccataaatgcctcccgacgttgtgggcttgcattaatgaagactgctagtcctcggatcttccatacttttattagtctagccattataaggatctaggggtagaagatatacctttttcaatgtatctgtgatctggataccgccggagatattgcgcttattctagaaggagtgggttttttcgtcagaccactctaactcgatctccttattacttggcactgccttaagcttcccaagaagctcattgagactcagttggatcacatgcgcgatgcatgggacgcggaagatcgagatatctgatgaatgctgagactgaaggttctcctggatactctgcatcaaagtattgttgttggttgcgttgtcagtggtcactgacaggatacgatccgagataccatgttctgttaggatctgggtcacggttttactgagattttcaccagtgtgggagccatggagaggctcaaagcctagaagaacctcacagtaatcccagttatgatcgataaagtaaccagtgatagccataaaggcctgctggaaaggagaagtccagcaatccaaggctatcgatagccggcacccctctggaagtctctgtagaatccccttctggttattctggactgtgatatcgagatgacgtcgaatggttcgtgctgatggaatcgtaagtttagtggatgattgctgagcaacctctaacatgcggtggaattgggggtgttcgatcactcgaaagggcagatgtgcagttgaaatgaatctcagaatagcatcggagagacggtcttgggtgaatgatatactagtggtacctggctagattgtagtacttaatgttagctgctaaattataaagaacttgcctactgtagtaacaccagttaagtaacccggttaacatatcattcttttgataagctggtcgattctcgggccacttttctttgaacatgctccagttttgaggtgcgctgtcataggcgaagaaccagcacgccggaatcttggatggccaattgtacagaggcatgccttacacataaccttcggctttccatttttgtcattcgcaacctggtagaagctgtcccagatatccgatttgctttttgattcccatcgaattgtgttctttacatcagactgagatccatactcagttgtaagccaccaactaacgaatttattccgtaagtcctccatatcatcacacatagaatcagatggatataaaacccagtgcttttgaaggggtccgacgcgagtaagggataagggcgcaaaggttgaacgagttgaacgagtcggcgatatcgatgggaccggtgtttggatacccaaaaaatcagagaagttgtcaggataaatccgatcagaagctaaatctatatccgaattggtgaatgagaactgtgattgagacattgagaagttaacaattataacatgtaatatagtagggtgcttaaaagaatagagaggcttacatctgaactagtagaggttttcaggggtaaagtaaacatactaggatattctgacttagacttgcttttgatgtggtttacctagatgattggctgtgttgtatattagtgcggataattggaggatatcctgcggatcttgaggatatcttgaggatattgcggatatcttgcggatattttgtggatatgttgtggatatgttgtggatattttgtggatatccacaagatatccgcaagacctcgaaactcgttaagtccgcatttcgagaacttctatctcggatttctcaagttctagtagtcggaacaaattaaaaaaataatcagtagatagatgggacttttagcttttatttgagcctaaaactaaaagaatttatctaataataacagttttgattttccatgttctgtttcctacgaagtttattatggttgacagtaggtaaatatatatttctacgtgtaacttaccacaaaatcgtcaatctacggccacctttacaatataacgtcggactaagaaaactataagaccacctacaaatactgtataaggagaccttcgatacatgtctatttcctaaaatttcaaagtgccgaccgtcgatttaaggggttggttctgtcaggactaaacatgcgtttatttcagtggtaaggaaatattggtaagctgcattaagatcatgtgataggctataagggggaaagtaagcgagagttatgctagtgcggatatggatatgaactcatatccgcagtgcggatgtggatatcaactcatatccaatatccgcaaattgcggatataaggatcgatctgatatccattggagcggatatgccgcagtctactatagactaacagctataagggatctaagcctttcacaaacttagtcaaaactaatacttatctagatgagacttatacggcacaatactactacattagaaacccagaataccctaggtagagtttagtattactacaaaaacacataaaagataagccttcgccccctcctatcactaataagcacgattccttgtgactattaccggccatgccataaaaatcaagagcctcgtttaccagtctttagtctatatcattccactccttttaccccctagctttaccttgtctaactgggcttctgctgtcgtacaggttgccacttcccaacccctcagccagagtaaaagcataacatggttctttatacaaattatctgatatcgcaaagaaaatcaatagcctaggtgatgtcgagagcatttcgacaatcgcttagtcagggctgttctggcttcatatttggtacaattgctcattaattaccgtcataagtcaattaccaaatttctgtccaacctacacagccaccactttaacacagatcagccacagtgcgtgaagcaactataatttataaggtacccgaaataggtatggctatgtataatactataatcactcattatcgttgcggcttataccacttttggcctactatcacatcgaatatatataaatcatagggagctatctaacaaatattaatttatgaaattttcctagtaaaccttgcttctaaaggcttttcagaggaagatatcgtatttaaggctcgtgttagtgttcaagctcatatagtagcttaggtgttttatcactaaccacaaatattgtgtctttctggcctttaacgcctctgcgaagcctaagacagcgctcgttatcctgacccgcgagatggtgtctggtttacctttcctaccttcacttgagcctcctagcagactcgatatgctattaaacgagtcccgagcttcactcctgaacttccgtcagatttgcctcaggtttggacagtccaccaacatacatatgggtaattgtttcttgtgtgctgcactcgcaatgatcgttcgtcgaggaatcaataggcgttagcgtacgtagataaccagttgtgtcctgtgggtagctgagttaatatatacgcacgattcctaggcagactgccgtacaatcttctggtgtagatggccggaaatgccttcagatcactccgtattctcgaaacccaatgcgttaggttttaggtcgagacctccgacctaaaacttattttgccgaagtctaacacggtatatctttaccgcagctgcggcggcggtgtgcagtttccacctactgatattattgtcgttccagcagagcaacttagactccaactaaagaagaaaggaaacccagtgaaaaataaagaagctgaaatcacggacgctatggcgaaaagaatttttccaagcccacgagatctggagcaaaacgcccacaagcggcggaaagtgttaggattgcggaaacttggaacatgacttccatgataattcaatttttcactttgttcatcgcagactcttagagtgtatttgaaggccacattagctaaggcgaggccctataatacacagagtactccgtgtacgataatcccttaagaattcgactaaacccatataatctcgactccctgcggcgccgggatggctcttgtccaagtcgtgaattgtccgttagattccttgccacgggattctaggtttttaccaatttcattattgaatatttttcatttctttgaactttttgaaaccactctaactctttttctgaccctaccattcacaatacatgacagagtacacttccatgtagccctgttcgcatgttccctggtcgccattgccagaataacaagtagcatcccgatatccatcacacacaaacttgccaaccttcactccgggtttgcctataggaagatttgttccttcatatttgcatgatttgccataagctttgaaaccgctgtctccattgtgaatcccgttaaaagagccgtccttctttacaaagtcaggagggaaagtttcagggcaacctttgctaccagtggaaccctcatagatctcccattgagcctcactctctacgttagtatggtagtagaagagctcgatatgcccagcactgccgccactcgtcggggcaggcccagttgcagtggttgtcagcccctccagaacggacagagatccaaacatggaagagaggaccgattcttgggaaatagcgctgctcagaacctcggcggggtcttcagttgtcgtaggccagctttccatggtgatcccatagccgggcgcaggtgttccgatgatcttggtcgacgatggggtgaccgagcacccggtcgtagtagagcaatcgatgtcacagtcggaacctttaatgcaaactgtagagcacacttgcgctgtttcagtgctgcactcatcctcatcgtcgccgtcagagccaatcccgctaccagtaccgccactgctgccgccgccgccagatatactgtcgaaactaggcgggcagcccaaacagccgcaccatggggcacagccgtgaccgctgcctttgctgtctttgctgacggtgggtgtgggactacccgaggaccaagtaattgtggttgttcccctgttgatttgagtgtccttggctgtctgggtccaggggtatggaggtggagtgagcgtagtggtggtgctggttggagtgggacctgatccgaatggagggagtacatataccatcaggggcaatgtaatgctgcttgtcatctccacagacgaaggggcagtttggctcgcattgatcgatactccccacaccggaatttcggtcatggtagctaaaacgttagtccgaagctctataacaatcaggttgaagatggatggcttacatgctgggaaagataccgtggcatacaccgttgttttcttgtatccccgataagtggttgtaatgccttcggcatcagttgacgttctggtggtcaagtagctctgggtaattggggtggtccattctggaaccttgagggtcgatggagattcaagaggcagcggaggtaaaatgatggagcatgggggttggcattcaacgaccggtgaagggtcatcccagatggaaggggcaatatacacatctccagatccagatccggagttggagcccgatttactggagtcttgttccacacaggctccttcaggacagtatccacgttgacaagtgtattcacacatgggcccatatattgtaacatcattccctggggcagctgtgccggttttatcggttgtaggagccatgacattcaccgcaccctgcccagtgcaagtgcacgcgttcattggacagaagccatgtgtgcagctgaagtcgcagagaccagcaaggttaccctcgccagttcccgatgtgcaggctggaggaaggaagggcgacacagtaggtacagtcaacggaacctcttcggtgccacagctggagggtgggcaatagccaagattgcagtcgaagttgcaaagtccactatagctggccccctcgcctgcgatgggatatccgaccactccggtcgagttgggcttcttgtatcccaagcccatcttcgtgcaggtacaggcgccaagcggacaataattgtatttgcaggagaactcgcaaagaccagcgaagttgtgtgcgccagtgccgttcttgcaactctgatcggacagttcttgcttgggcgaggttgacaccttgttgccggttgcactacccacccaggcattccagttctgaatcccattgggacagcctgacgagattgactcaccttggatagtggtgataacaacgttgttgcgcatcagtgacactgtcacaggtccagtacgaccgtcaatatgctggctgccgtggtaggcaccgatatcatcgtctggaactactgaccatgcagcagttcgagcgtccccaccgatggagacgaccactccggaaaatgaaccaagcacagcggagaagaagatacgatcctgggccatttcagcaggcggaaattcaatctgcagctgctgcgcagtgtttccactggtgcctccactggcacaggccgccccagggctcaatcgataccaagagacaatgctctcttcggagatatgggcggtgccctccttgtacatatcgatccagaaggggaggtgtttgcgccagccatcgtggggcatatcggtcacgtagttgaatggtgcctttccaatttcgaatgcctccatggacttgccataaagagggccaatgtagtgagactcgccgtagtcattccatgagataatctgcacaaactcaggctgtacaaagagtacttcctgccagcggtcatgccagaggtggtctcctctccacatccagttcttcttatacccaggcaagttggtatagaaccacggagaaacaggcatcatataaggcattccacccaggtattggatgtaggaagcgtcaatataagtgtccatatcttggggaccccatggccatcctgcccagctgaacagaccatcgacgactccagtttcaacggagggtttggcgcccagagaagaccagctcgggataaagaagcagttggtagcagacttgatcgaaggccaatcatcggcacggccaggaccttcaaaggtagacacaaacgcttgacctttgtaaaagaagtatgaggcatgtgcgctatactgattgatcaggttggtgacgtcactcttcggccaattgccgtttccagcataatcgaaggaaaagaagagtttgaagccgacactgtccgctgctgaaaatgcggctgggagggccttgatgtttgttggatcattgtaggccatgttgagtgcaaaggcgtcaatgtgcgcatcctgcgccagtttcatatcgttctcccagtcatcagatgtatagttggccgagttggttacctagtctcctgttaacaaaaagtcaagtttttatttcactgggtagatatcctgcttaccatgaagtgagcaaagacagacgctgcctgcgcctgacaggccagcgtaagcaccgtgatccatatcaggaataaggacatgctggtcattgcaaacttgaaccctgagaaaggaagcgaggtatcccaacggcctgggataactgtccctttttgataactacgctttatatcgtccaaccattttgggcccttgactccgagcagaattgagacatttctttctcgccatctccactaaactagtcgaattgcgtcgggtaagtcggagattgcatggtcgcgacctaatttactagtagtcgagaggcgtcgcttcatgaaattgcctcgcgtgtactagtaatataccgccgtcaaaaatctatgagctacgctagtgctaaaagatcgacccgctaagtggatcatggtcaatgtaacaatatctgcttagcgtgtgcggcgagggaactaattgcttggcgtgtaaggcgataccaaacgaagtataccactagcatctttgcagcgtagcttagccaccaaaagagatgccaagaatgcaaccttggaagaatgcttagaaaggcttcgaggtaaaattgacttggaccattaaaatgtttgaccgcgagaaggctccaacggcctcaagttatgccatctcttcaaagatcatcaaaaagggaactagagagaaaagtagaaagacaagtatcaagccaatcataaagccagtcagcgaaggttgttgtagttcggaggtatgaattgacttatttttttcagagcgctagttatatgagcctgtatttacaacgatgagccaagttaatttcctatcaacttcgtcttgagtatagacacttcggagcaattccgacagtgcgacttttcctgacctgcaccagccccatactacaaccgaacaaaggtctcctagcgttggagccggactctttgcgtggccttcaacttcagccctcggagagggtatactgattcgtagagtcgcagcaaattttccaataggctacagattaatagctcacaatttctcagctattatttgtagggactactcgttccacacccatattccttgctaccacacccctctaacccgaataagctcagcgtttgagtatcttacatgaccgctttcttccgaaattatccaatacacacagtacttctaatcgttgaacacatagtactctgtagtcaactatatggctcctgtataaaacgataccagtaataacagcgaggtgtagtagtatatacatatcccaaattagtcctaaatataaaacagatactgaaaaattattctgcttccaggtatctaaatggtgtatcttacgtaattttatatagcagaatggtcagatcctgtggtaaattttctgccaatagtatgcacgtaagaaaatacagtgccatgtaattgaggtgtctaccccctaatcgggttagaggggtgtggtagcaatgatttgggatgtggaacaagtagacccctatttgtagtgactcaaataaaccaatttgataccctaagtacacaaaaacctgctcctcggtcagtttgagatcacaagcttgtactgccgttgccccacatacgcaacttgcatatggtctcccagttgagaaacatatcctcacaatataggtacttcaatgatggtggccatttccgtgctggcggccatgtctgtgatgacccactccgcgcttggcccggggctaaagaaacaaaccaattgttagcgtgaactttcgagccgagaacaaccgaaagaccaaaagcgtaccggatagctagtctccattgccacgccagtgctagtcacagcgatgctggacgatgggccgggagtagcaactggcagagtcgtattgatggggtcacacccgccgaaagtgaagccagcattatccgagatggtcaaagctgcagtacgatgaagatcacaccgaccggaaagctccatgtagatccatgattggcatttctcgaccctaccgcaccagtcttgacattcagcggtcgtattcatatcaaaggcgaaagtgataggggcgctgttgtaacaagcgattgtgtcatttcggattgaggtccagcattcagatgagacctcagtggccacagccagggtagccaaaacgacgaaagagtagatagggaccatactgccaacgataggttcagaataagagtagcgaatagatattcggtcagttacagacggaattgagaatatatggcagactttgtatttttgcctctttgcgagccctgttatctcttcggcgtgttgccaagttcaaactagcctactacacagtccactggtcctagtctgggttttctcggctggcaggagactttccaggatgagttcttcggccaattattcaccatctccgtgtggattgggtagcttttggttgcatcgacacaaaacttcagatattgaatttccgaagaaatgaaatcctcctgtgccgaacagccggaatgtggataatcgaaagttttggttaggtttatcgcgtaacgaaacacttagattgccttaaatccacactctcaggatgctagaagaatatcaggacgacaacggtggatattttaatttgccagtcaagtatggataagtgcacaatacatactagtaacaagtgccgccacaagcctgtgtactagctcctccatgtctcagagatgttgtcccactaacgctgacgttggggccactttcagcctctagaccactaagtgatcgccaagacctactaagccgccactaacgagccgccaagggtctgtaggctttaagtgatggtccacaaaaccatggctttgtcaaaatatgtagacttattactacacactagcatgtaggaaatttgcaatctccgaggttgggtcctctcaaatataacgcctcaaactgactgcagcgtgcatacccgcccgatccactagatccttgtctaaactgtgttttatggtgggagtccattcggttcccaacttcatgtctcagttgagcattattgcgatggtattttttgcctcgttatttacctactttatctactaaccgaaggtggagggcggattgtaccgaagtccgaaccggcctctggcgatcaagggtatataaaataccgtccgcacaggttgcctgatttatgtgttataatcagtgttgctactagttcccttgtccgggaacgactggtccgaatcatgtattccaattttgctatcatgctttggttgctgcttgtgccttccattatcgccgttccaaccatggatgccttgttcaagcttaaaaagaacgaagctggaagtgacacggacagccttggtggctgtgctaagtatctcgacaaaatacttccaaggtggttagccgaaactagtgacatggttgatgctggcctccaggtattcacggatgccggaagttccaccgatagcccaaccagaacggttgcccgggattttctccagacctatttttacatgaagataacggagacggccaaggtaaaggtggtgaagggtgggtttctcgccgcttatacagccttccagattacgttgctgacctcatttaagacagcatcaaagcagtgaggacatttctcgatggggagccgctccaaaggggcacgccacatttctactgcggtgacacatggctcgaaaaggttccgaggagtgacgtggcttgggattcgaatgggaacgatttgatgcaacttgatgtcgatggggttacgttgcgtcctgctacatttgaggaagtgccagcttacaaagaagacttgttttggactaacccaaacacgaacatgcaagagaccactggccgtgttccttattggtcaccagatttggcttcatttctttttgactctgattacgatgggcgaacttactgcgcaccaggaaacggcggcttgggtgcaacgcaacaaatgacgaagcccgctacgatgaccttctgccctcttgctttcgaatacgacctgaataccgaggttttgggagaaaataagccttcagcaaggatgtcaattacgaaggttatcccgcgaagcgcaactctctaccatgagctcatccacctcgtcgttggtactgacaaaacacaagattacacttgtaagttcttgtcggatatgttaggtcagaccaacgctgataacctgaagacgaatggagtaagatgcaaactgcgctcaagaagcccaatggtacgccgtcgaagaaagaagaggaaaaaactgggcaatattgggatggaatgaaatatcaggatatcatgcgtcaaaatcctgagacatttgtcttcttcagcgtggggtattggtattttctgcagactacatggaacaagaatgcgcggaagcggtggagcttcgatactggtgcagctcggctcgtggcgatataggcaaatgacgaaaatggaaatggacattttctagaagcgaaatcgacaaatttggtacacaatcactgttcaaagtttgacagggccttgaaagctgcctttttgcttctttcttatatacagttgcatagaaagcactttgggatttgggacttcacacttgtcctcgcttgttttcacttgtttgtcgctggtttgtttcgtataattttgtacggcagaatacggagtaagatcgtgagagttgctctattaagggtatgaggaatttagtagtagtcgctaccaatagcaaagagtaaatttcaaatcaaaaacaaagacattcaagcaagagtgattggcttgaaatcacaaaactcttccttccattccaaggctccgacgctttctagcttatcaacaaacttctctagtagggttctcgcgtcccacataagatagccactgttggaatatttcccaacatgcctatactcggcgctctttgcgtccgtccagaagtgcggccatagcatcaactgagcttcttggccatgcacgagctctgttccaatggcccatatctttaatggaaggtcggtttgacgacgcttcacaccatgccgcacaccgccaatccctgcagccggttcacgaataccaatcaaatccgaaatctgagtcttctgggcatcggtcactggtgtcaaaaagtatatccagaacaattccacgtaagagcacgttaacgcatcaaaccagctagggcccacatagtcggagctcctctgcgaaaatgtctctcgagaggacgtagctctgattcctctagcttcgaggttctcccgatagagctgggcggaaggcgaggccatgaatgccctcatatccgaggctctctcccatgcttggtggcagttagcgggacgacctttgattcccggttgatacacaactcacctgtaactaaaagaattgtatccgggcgctcctgcactcttgcatacccggaaccctcgtgccctggggcccgaagcagtggctggaaatgtccagcccattcggtatccagctccagtcccttggaaacttgaaactcggtccagattaggattgcttggtcgttgaggtcgtcaacctgtgatcgatctatagtatcatctcccaagggcgccatgactggagagggttgattcggatctgaacaggatttttggagagaacgactgggggcactggggttttactaagggcactagcgctagcgttgtttcgcctttggccactattcaacgcggtccctttcgtttcaatactggtaatgctatggtaaataaaccacgtgacatttctccttggcgttgtgagaaatcatattagtcaccatacttcgaatattgaagctatttgttagagtggtcacgtgattagcatgtgatcagccacgtgatcccaccgagtcctagccaatgagactataccgccgccaagtgcggttgagaaatctgggtttttacaaggatgcggctagtgatgggcgcattgctacagacgttgtgaatcaaagcacttcattactcccaccgttcatgcacgcgagactaaggccgtgcgttgatcaccagagccggataatcccgcaatcctctcagagttgactccgctttgaaatcgtaaatcaaacccgcctgagacaggaggtcagtaatatcccgaatacacaatttattagcgcccggcagctaagccgaaagggcaactatctttgatctactatacatgtcataatatatatagtacgatgtctcctccgagcccatacatgaannnnnnnnnnnnnnnnnnnnnnnnnnnnnnnnnnnnnnnnnnnnnnnnnnnnnnnnnnnnnnnnnnnnnnnnnnnnnnnnnnnnnnnnnnnnnnnnnnnnnnnnnnnnnnnnnnnnnnnnnnnnnnnnnnnnnnnnnnnnnnnnnnnnnnnnnnnnnnnnnnnnnnnnnnnnnnnnnnnnnnnnnnnnnnnnnnnnnnnnnnnnnnnnnnnnnnnnnnnnnnnnnnnnnnnnnnnatctcagatgtccgtatcgcagcggatcctcgtgggttagtaattttgttagtaggctggcttgaaggcgcttctctaagtgttcaacatcctattttcggcagttgaagtgcgtctactatctgtaacacgaggtggttagtgggttagatcggcgaaagggggtgatttatgttcgtcggcatggttaggtgcctcaagtcggcccgtggcgatggcaaatcgtattgaggcccgtaccgtctctgaccctgtctcactagggcgaacatgccaatctttcggtcggttgggtactggtccgtttcgatatatgagagccacgtctgtattgcttcgtcccccttgaccatctccttggctctgccttcagtttctcggtcggggaactcggtgatattggagaccctccgaataatcctcatgctgagaaattccttgaacgtgacctttgaacctgggtgcagacactcgagcttgcttggatttttggtcagggcgtggcaaccgcgcgcgctggctctccattgactgacggtcgagggcaccttcggtgctggagggcggggtgttggagggggttccatggttacttgaaatctgctttttccgatgagtgtttgtgggagaaagatgagaaatcttgcctttccattaacgaaaccaaaggttgttttgagctgacaaagcagcacaaacctccagggctaggtacctacctacctaggtagagaaacaggtcttattgaggcaccagatgaggtcgtattgatctatacagaaattatcctgcaactttaggaccaatagacgatagtttaatcgaaacttcattgaatgagactgccacaaacattgttctgttgctactatataaatgcgtaggcccgggttgttggatgctattgctattgtcgaagatagacaggttggttttgagtataacgagacgttatagggctgtacttaaagataaggagtactacgtaaaatattaaatgtggatcctaagcaaaagatcttaaggtttcaaacatatatcttcaagttcgtatagccctaaaattggtagtgctacttatagatataaaaagatatatattttgtgatggtggggtaaaaatgcgggtgggtaaaatattttgtggtagggtctgtattaaatagctaattcaagctcatagacgtaacagggccgacaagagagccaataataggattcggctcttcaggctatcggaactggctggctcatatcataacgaatgaagagttcaactggtgccgtttcgtcatccgcaaaactccatagctgagaatattgcaaaagcaagctttctccatgtaatgaagcttgaattattcttccatgattctgtccagtgtatgaaagaaccaataactataaaaaaataagtgagtgcttaggaaatctctagtagctaggaagtgtaagtaagatactaactggatggatcgggtggtcccggaacggccgatcggatgttcgagcaaccatcacggttacaacagnnnnnnnnnnnnnnnnnnnnnnnnnnnnnnnnnnnnnnnnnnnnnnnnnnnnnnnnnnnnnnnnnnnnnnnnnnnnnnnnnnnnnnnnnnnnnnnnnnnnnnnnnnnnnnnnnnnnnnnnnnnnnnnnnnnnnnnnnnnnnnnnnnnnnnnnnnnnnnnnnnnnnnnnnnnnnnnnnnnnnnnnnnnnnnnnnnnnnnnnnnnnnnnnnnnnnnnnnnnnnnnnnnnnnnnnnnnnnnnnnnnnnnnnnnnnnnnnnnnnnnnnnnnnnnnnnnnnnnnnnnnnnnnnnnnnnnnnnnnnnnnnnnnnnnnnnnnnnnnnnnnnnnnnnnnnnnnnnnnnnnnnnnnnnnnnnnnnnnnnnnnnnnnnnnnnnnnnnnnnnnnnnnnnnnnnnnnnnnnnnnnnnnnnnnnnnnnnnnnnnnnnnnnnnnnnnnnnnnnnnnnnnnnnnnnnnnnnnnnnnnnnnnnnnnnnnnnnnnnnnnnnnnnnnnnnnnnnnnnnnnnnnnnnnnnnnnnnnnnnnnnnnnnnnnnnnnnnnnnnnnnnnnnnnnnnnnnnnnnnnnnnnnnnnnnnnnnnnnnnnnnnnnnnnnnnnnnnnnnnnnnnnnnnnnnnnnnnnnnnnnnnnnnnnnnnnnnnnnnnnnnnnnnnnnnnnnnnnnnnnnnnnnnnnnnnnnnnnnnnnnnnnnnnnnnnnnnnnnnnnnnnnnnnnnnnnnnnnnnnnnnnnnnnnnnnnnnnnnnnnnnnnnnnnnnnnnnnnnnnnnnnnnnnnnnnnnnnnnnnnnnnnnnnnnnnnnnnnnnnnnnnnnnnnnnnnnnnnnnnnnnnnnnnnnnnnnnnnnnnnnnnnnnnnnnnnnnnnnnnnnnnnnnnnnnnnnnnnnnnnnnnnnnnnnnnnnnnnnnnnnnnnnnnnnnnnnnnnnnnnnnnnnnnnnnnnnnnnnnnnnnnnnnnnnnnnnnnnnnnnnnnnnnnnnnnnnnnnnnnnnnnnnnnnnnnnnnnnnnnnnnnnnnnnnnnnnnnnnnnnnnnnnnnnnnnnnnnnnnnnnnnnnnnnnnnnnnnnnnnnnnnnnnnnnnnnnnnnnnnnnnnnnnnnnnnnnnnnnnnnnnnnnnnnnnnnnnnnnnnnnnnnnnnnnnnnnnnnnnnnnnnnnnnnnnnnnnnnnnnnnnnnnnnnnnnnnnnnnnnnnnnnnnnnnnnnnnnnnnnnnnnnnnnnnnnnnnnnnnnnnnnnnnnnnnnnnnnnnnnnnnnnnnnnnnnnnnnnnnnnnnnnnnnnnnnnnnnnnnnnnnnnnnnnnnnnnnnnnnnnnnnnnnnnnnnnnnnnnnnnnnnnnnnnnnnnnnnnnnnnnnnnnnnnnnnnnnnnnnnnnnnnnnnnnnnnnnnnnnnnnnnnnnnnnnnnnnnnnnnnnnnnnnnnnnnnnnnnnnnnnnnnnnnnnnnnnnnnnnnnnnnnnnnnnnnnnnnnnnnnnnnnnnnnnnnnnnnnnnnnnnnnnnnnnnnnnnnnnnnnnnnnnnnnnnnnnnnnnnnnnnnnnnnnnnnnnnnnnnnnnnnnnnnnnnnnnnnnnnnnnnnnnnnnnnnnnnnnnnnnnnnnnnnnnnnnnnnnnnnnnnnnnnnnnnnnnnnnnnnnnnnnnnnnnnnnnnnnnnnnnnnnnnnnnnnnnnnnnnnnnnnnnnnnnnnnnnnnnnnnnnnnnnnnnnnnnnnnnnnnnnnnnnnnnnnnnnnnnnnnnnnnnnnnnnnnnnnnnnnnnnnnnnnnnnnnnnnnnnnnnnnnnnnnnnnnnnnnnnnnnnnnnnnnnnnnnnnnnnnnnnnnnnnnnnnnnnnnnnnnnnnnnnnnnnnnnnnnnnnnnnnnnnnnnnnnnnnnnnnnnnnnnnnnnnnnnnnnnnnnnnnnnnnnnnnnnnnnnnnnnnnnnnnnnnnnnnnnnnnnnnnnnnnnnnnnnnnnnnnnnnnnnnnnnnnnnnnnnnnnnnnnnnnnnnnnnnnnnnnnnnnnnnnnnnnnnnnnnnnnnnnnnnnnnnnnnnnnnnnnnnnnnnnnnnnnnnnnnnnnnnnnnnnnnnnnnnnnnnnnnnnnnnnnnnnnnnnnnnnnnnnnnnnnnnnnnnnnnnnnnnnnnnnnnnnnnnnnnnnnnnnnnnnnnnnnnnnnnnnnnnnnnnnnnnnnnnnnnnnnnnnnnnnnnnnnnnnnnnnnnnnnnnnnnnnnnnnnnnnnnnnnnnnnnnnnnnnnnnnnnnnnnnnnnnnnnnnnnnnnnnnnnnnnnnnnnnnnnnnnnnnnnnnnnnnnnnnnnnnnnnnnnnnnnnnnnnnnnnnnnnnnnnnnnnnnnnnnnnnnnnnnnnnnnnnnnnnnnnnnnnnnnnnnnnnnnnnnnnnnnnnnnnnnnnnnnnnnnnnnnnnnnnnnnnnnnnnnnnnnnnnnnnnnnnnnnnnnnnnnnnnnnnnnnnnnnnnnnnnnnnnnnnnnnnnnnnnnnnnnnnnnnnnnnnnnnnnnnnnnnnnnnnnttaaattgtacagagccgtcacctatcatgccaacttgctggctatagactccgaggccttggagatcaccgggggaaagaaaccaagattcgcaactcttaagtagcttgtagagtcgcttaacttcatcgcaacgcctagtctgggtttgtttatccattttcgtgtgagaggggaagagtcaagaaacccgagaacgaaagaaaatcaatagaattgatgatggatggaagtgacgatggagtgtggtcgccaatatgttggatggtcaggtgaccttaggcaggccacggagacgtagacctcattaaaaacattttgagggcgggcactctgaggggccctgtgggggctaatctcttctgggtatagtctgaggtgggctgagtgcatcagtgttgctcactgattggacactgagtatcactcagtcatcctgcacgtgactgatatgagcatgatcactgatctgagcccgtgctgacatctactcagtgagcctgagcctgagcaccctcataaaagcggcggcagctcaaataggaaagccccacccgccagggaatatccggtacgtattggcatgtagagtgatccactgcctgacactaacttagagcctcgtcacggcctttcgtggcccactgccgcttccattgttaggctgccctcatggcgcacgactacgaaaccgctgtgacgcctcggcgaagtccaatacggcctgaaccgtcttcgccctcgagagggtgtctggttcacccttctcaccttcctttgagcctcccagcaggctcaacacgctgttcatcgcgttcccgactttccttctcaattccgtctgcagcatacggagcctcgggcattccgtcagcacgtgcctttggtgctttccttccactcctgactccattgggcataaattttactgcggacggatgcgttctctctcgatagtagcggtcggaagggatgggttttacccggttgcgcggcttccttagcaagtcgatctgctgcatcattcctgacattcccacaatgtcctggcatccactggaggcggagtctgatattctctgcctgaacctcggaagctgcctgtatgattgcaaggccgatctgctgtcacataagattgttgccgttgaccgtactccatctccggcatttgtgcgccggtgggctagcttgaacaccatgtcgaccgcgtagaagatgccaataagctctgctacgtggaccgaccagcgttccatcgggcccacctgcacctgttgagatttcaccacctcttcctggtcgttgagtgcgacgatggcagttccaagatggtcttcacgtccggaagcgtccgagtagacaataatatcggacatatttctcactgaatctgcccttcctctcgctatttctcgatcgcttccaagctcaatttccgagaatgcgtttgctcgccacggtggtaatggacttgggtcgatcgtttctagctcattcagcctgtcgacgtctatagtcttcagcgcttctgcaagaggaaagcgcgcgtacgatcccacattgtttctacgattctgggcgcgcgataacgcgctctaaatgggatgggcacgaggtggagtgtgtagtctcgctatagtgcgttgcgctcggtggcgaagatggagatgcgtggggggtaggtaggcttccacttcaagcgttgttgtcgctaccgttcggaatgccgataggattcgaatcaatacggttctctgaactgtgttcaagtgtcgcaggtgagtcttgtcccggagcgggtcatgccagaccgttgatgcatagtctataataggcgtaacgcatttgctcttggcgtaagtggcgtagaccacttaaagcgacggtcgtcttggtagcacgtttgatggcctgctgaacgtgttccttccaccgaagttcctgatcaaacaccacccccagcagtttgactgaaggcgatggtttgacgtcggctccatcgaaggtgatcctcccttctaagtgttctcccctctttctggtgaggtggatgagctcggttttctccgccgcaagacacgatcctgtcctctatacgaggaacatcctcggactgtatcttggctaaattttcctcggccgagcgacccactcgctatcggaagtagtcgtcaatgaatgctgacgcgcctccgtgggagtcgacgggctggacgaccagatcggcgttaaagaatgcaaacaagatgggggagagtggtggtccttgcgctaggcctgcattcaccagcagctcggtctcggtgcggaagtcgtcaaatccaatgttggcgtgtcgaccgctcataaagctcgcgatccatttccttgctaccattggaatacctctcgtctgtaacgaggcatccagactcacccggttcaccccattgaaggcgcccttgagatcgaatgcgattaacgtcaccaccttgtgtttgtaccaggctttgtcaatcgcactagacctcctccgagccaaccttcagggctgggatacacccccatatttctcgaggtttcatgtatgtggcagctttccagagctttccttcgccggcctcgtctaggaactgtctccaatgcgaagctttggccttctctatagcccgcgtccacgctcggcgcttttgttacataagttgaaaggctgtaatggtgttgacatgttctcgtccaagctccgcacagcttgcctgccatcttctgcgcagttgattcccttcgacttgttggaccttcaggtctggtgtaaaccaccgtttggagtatggtgttgggcgagtgtcgggcgtgagctggtccacagcctgggctgtagctgatatgagtttctccacaactcggtcgagtcctggccgggtcttaatgcctttccaggggcccgtctgtcgggctacctcctcgccgattctggcccagtccgcgcgatcatacacttttctcgctttgttgtttggcttattctgaggttgaatgttccattccgaatacgtcgcgcggtggtctgacccgtagttttcatggtacagatggcatttgacaagtagttccgggttgtttgtactgtctgatcgatggtcgagctttgtcctggattattcaaggcccagtaagtcgccgttcctcgcgggatacagctgtagaggttgtgggtttggaaaagtcgatcaggtcgcttgcttcttcgataagtcgcggttggatgtagttaccgccctaggttgggtgatggcggttaaagtctcctgcgagaacgatacttgtgggtcgtcgaccatcgcgtagagcagctgtgatcgtgttttggatggcggtaaatgctggttctggcgacgcactatctggcgtgcccagcgggacagataggatataaatagaaaagaggaggagttaagtgtcggctgtctagatcttgatggcggcgatatctgggtggttgtaaagaatctgccggtataaagacgttgagattcgcttgttgacgtagattagactctggaatcgatctacgctggtcttgggggttggtcggtatagccgctaggcgctgtgattgatatgtgtttagtaggtggtgatcgagggctcttggattagaagtacatctaagttttgggtttagtggttattgatgagtgcttccatcctgggtcccgatttcatgatgttcaactgtagtatgtgcaggttcgtttctaacattgatgggggttggacgttgcgggtgtagcacactgtcggtcaccagttgggtgttcaccactacaatccaggcatttggccctgatccctggagggcatcgttgccgctcgtgttgacccgcacaatgtccacaacgtggtgtttccttgcnnnnnnnnnnnnnnnnnnnnnnnnnnnnnnnnnnnnnnnnnnnnnnnnnnnnnnnnnnnnnnnnnnnnnnnnnnnnnnnnnnnnnnnnnnnnnnnnnnnnnnnnnnnnnnnnnnnnnnnnnnnnnnnnnnnnnnnnnnnnnnnnnnnnnnnnnnnnnnnnnnnnnnnnnnnnnnnnnnnnnnnnnnnnnnnnnnnnnnnnnnnnnnnnnnnnnnnnnnnnnnnnnnnnnnnnnnnnnnnnnnnnnnnnnnnnnnnnnnnnnnnnnnnnnnnnnnnnnnnnnnnnnnnnnnnnnnnnnnnnnnnnnnnnnnnnnnnnnnnnnnnnnnnnnnnnnnnnnnnnnnnnnnnnnnnnnnnnnnnnnnnnnnnnnnnnnnnnnnnnnnnnnnnnnnnnnnnnnnnnnnnnnnnnnnnnnnnnnnnnnnnnnnnnnnnnnnnnnnnnnnnnnnnnnnnnnnnnnnnnnnnnnnnnnnnnnnnnnnnnnnnnnnnnnnnnnnnnnnnnnnnnnnnnnnnnnnnnnnnnnnnnnnnnnnnnnnnnnnnnnnnnnnnnnnnnnnnnnnnnnnnnnnnnnnnnnnnnnnnnnnnnnnnnnnnnnnnnnnnnnnnnnnnnnnnnnnnnnnnnnnnnnnnnnnnnnnnnnnnnnnnnnnnnnnnnnnnnnnnnnnnnnnnnnnnnnnnnnnnnnnnnnnnnnnnnnnnnnnnnnnnnnnnnnnnnnnnnnnnnnnnnnnnnnnnnnnnnnnnnnnnnnnnnnnnnnnnnnnnnnnnnnnnnnnnnnnnnnnnnnnnnnnnnnnnnnnnnnnnnnnnnnnnnnnnnnnnnnnnnnnnnnnnnnnnnnnnnnnnnnnnnnnnnnnnnnnnnnnnnnnnnnnnnnnnnnnnnnnnnnnnnnnnnnnnnnnnnnnnnnnnnnnnnnnnnnnnnnnnnnnnnnnnnnnnnnnnnnnnnnnnnnnnnnnnnnnnnnnnnnnnnnnnnnnnnnnnnnnnnnnnnnnnnnnnnnnnnnnnnnnnnnnnnnnnnnnnnnnnnnnnnnnnnnnnnnnnnnnnnnnnnnnnnnnnnnnnnnnnnnnnnnnnnnnnnnnnnnnnnnnnnnnnnnnnnnnnnnnnnnnnnnnnnnnnnnnnnnnnnnnnnnnnnnnnnnnnnnnnnnnnnnnnnnnnnnnnnnnnnnnnnnnnnnnnnnnnnnnnnnnnnnnnnnnnnnnnnnnnnnnnnnnnnnnnnnnnnnnnnnnnnnnnnnnnnnnnnnnnnnnnnnnnnnnnnnnnnnnnnnnnnnnnnnnnnnnnnnnnnnnnnnnnnnnnnnnnnnnnnnnnnnnnnnnnnnnnnnnnnnnnnnnnnnnnnnnnnnnnnnnnnnnnnnnnnnnnnnnnnnnnnnnnnnnnnnnnnnnnnnnnnnnnnnnnnnnnnnnnnnnnnnnnnnnnnnnnnnnnnnnnnnnnnnnnnnnnnnnnnnnnnnnnnnnnnnnnnnnnnnnnnnnnnnnnnnnnnnnnnnnnnnnnnnnnnnnnnnnnnnnnnnnnnnnnnnnnnnnnnnnnnnnnnnnnnnnnnnnnnnnnnnnnnnnnnnnnnnnnnnnnnnnnnnnnnnnnnnnnnnnnnnnnnnnnnnnnnnnnnnnnnnnnnnnnnnnnnnnnnnnnnnnnnnnnnnnnnnnnnnnnnnnnnnnnnnnnnnnnnnnnnnnnnnnnnnnnnnnnnnnnnnnnnnnnnnnnnnnnnnnnnnnnnnnnnnnnnnnnnnnnnnnnnnnnnnnnnnnnnnnnnnnnnnnnnnnnnnnnnnnnnnnnnnnnnnnnnnnnnnnnnnnnnnnnnnnnnnnnnnnnnnnnnnnnnnnnnnnnnnnnnnnnnnnnnnnnnnnnnnnnnnnnnnnnnnnnnnnnnnnnnnnnnnnnnnnnnnnnnnnnnnnnnnnnnnnnnnnnnnnnnnnnnnnnnnnnnnnnnnnnnnnnnnnnnnnnnnnnnnnnnnnnnnnnnnnnnnnnnnnnnnnnnnnnnnnnnnnnnnnnnnnnnnnnnnnnnnnnnnnnnnnnnnnnnnnnnnnnnnnnnnnnnnnnnnnnnnnnnnnnnnnnnnnnnnnnnnnnnnnnnactctcgatctgcactttgactcatgcaaaacgttttggcaacgctctctatcattttggggggtggcaattgtcccggcatgttttctcagctcggctccttgcacctctgatacattcggtgttacgcagtacttgccgaaaacgcatgaatatgttttggatacaataagctatcattcaattgagatgattggaagtattctactcggggcgccatatcacgactcgagccatcttgcacttatcctgtacagctacttgtcacttgattccttaaccacaatgacgttcaacatcataaagtttcgccccccgctgtatcatatccagccaccgtttaacacgtggtttcagcaagaattgtaaaatctactgttctcggcccacattgatggatgaaggaaccaggtccaccgttcattcttttagtctccattacttcatcgctcgaattcgtggccaaccaacatacaagcaactcaagtccgcacatattgccacctgaggtgcaatagtcattggacgattggcgtatcatccacactaaaagatggcttttaaatgtggatggtaatttgctataaaatgttttagaatcttgcctgctacgtagtgggaagttagatacaaactaacattggacaaacttgatcgagaaccgaagaattgtcgacaggtgacacacgtgttgtgctctcctctgctgcgctagtttttgggctgtttcaaattggatgtcgcaggagatacagtagttgtgttcagttccgaggtgctcatcaagctcaaccatctccgcgaaatcttgtggtgggaaacaaatgtagcagatatgatgatatggagagtcgtagatatgttgcagcctcgcgaagaaagttttaaagctgattgcgcagtgcgtgcaataaaattgtttcagaaacatgatccaggattgttaggatgttccccttgagcgttgggagcaagaagaacaagtgattgtttgtttactgaatgaagtcggtgcggagaaaggtggtggggcttttgaccgtgtttgagcttttgtgactcgtaggcccaccctttattccaatcaagctacatatttggtagatccggtcgacacaatgtcaatacgagatgcctctttacgccgagggagttccggaccagattctgcatctggatatggtcgaaaagaatgatcaggaatcaggaatcctgatcattctgatattgccttctgccaggcaaggtgatgcgaaagaatactgtcaatagggtttgcaagaacattacaggtaatttatagagcctcacatcacgtgagagccagtttcaatacgattcggcatttgaaaataggctcagcctgaactagattggcgtgtttcggaatggggtacaagaaagatttcacgagagtaaagtggtgaaactgatttcgatccatgctgtacctggtcatgaagaaacattgttcattattgccgtttttccagaaggagtccagccctttccaaggtattggctggagcagcttatgtcttcaaggaggcactgaattatagagcaatttgtttgtctcgagctaggatctgattcctcataccggcggcaaagtgacggcaaaaatgttaatttgttgactgactcatggcttcgaataaggtcgttcatccagcgatcgatggcattcaaatcccaatggccattggaggatttcaaatatgggtgttgtttggttatggagatgattttacgttcaatttatatgactactcacgtggtatatcgggacagcttctcgagatgctgtgcgattgtgtgaaagttttcgcgagattctgagaaaaatggtaggtccaaagcacaggccatattgtttctgagggcaggtcaagacaatatctccaccagcacaatatgttcgtagcagcctatgttgctctggccgggtgctcttggttttcggtaaaagcctcggagggtcaccagcctcctgcagtttgatgaccgtatttaaacgaacggtcgttagtatgtccaaaggctggtcaaatttagcaatgtgttctggagtattacttagttaccgctcgtcgaggttgatattttctacttgctgttaaccgttgctcctgcgcaaaccgaccggcttattgttgagcattttgtgagatgtaaccgaaagattgtttatttgccaaattgtgagctcgttttttacacatgttgggtcctcatttcatggactttatagttgagacacgatatgttgaagtatgcaagtttgccatgttttttttctatctagtgtctgagatatttgggcattgcagcctacttttcgttatagatatgccaaaagtactatttatgggtcccaccagtgttggtttgatcaaatccagcaactcttgccatggccctcaggaaactaggacataaaaaaatcgggcccgcaaatcggtggttacggtgacacaagaaggatctttggattagccagggaaaactgttcgacaagcctgcctacagagttctattctggcttttctaccagttttatgccatggacggcgccgtcgctctgggtaacccgggagatattcactcctagaatagcaagaatacgcttctggaagaactctcctaccaaagacctatgactgagaggacggcaggtccgtgagaatgggtttttcccatggctctccctccattgacactctcatcgtatttctgctgacagtagcgccgaagactgaagttgtctatggacagagaggaaccattcaataacaagttctctggtccattccatgtttgagcatctgcaaattccattgtcttcaatattcatgtctagtttaacctcttttcatgcctccacgatcctcgaaacttatgctgtacgaatgcctcctctggaatcgatccgtcattcgtactgttagaatgtgactggcccatcccaaacccatcgattggcagtatcaggatatcccccacaagcctcggttccgtcaatccactcaagtcgcttaacgacgtaagatccggctcatcctgctgcaattgtcggaagacggcatctgtccaagcagatggcccagtcaatttcatgacttccgatgaactgacatggagctccgagaatgttgtttttcttgcggttgtgagtttttcagggtggtcatggacgcagaaagtgggcccccggggataaaggaagagagtttgtagttaaaactgatttcgaatatcactgtatacttcctgtcaacgtaagctgacaatctaatatatgtcgtcaattgtatatcagtccttccttccagtttaggtaggattagcacaagccgtcgcactgctaataccctggactagagatgggctcgttagctctgtccttggtcgctatcactagagaatgatgagcagtagacaacaggccgcggtgacaaagtctgccgttacagtaccgtattgcactcagagaacccgatcgccgtgaacacatcaattaaaatctccttctatgaactagctgagcccaagaagcttcgcaaataaaccttgacatgcccatggttgcgttccttggcgatggcatacgccgtctggccatttgaatctttcagtcgttttttcagaccacgctgattggccagcaactgtacaacctcataatgcccaccagccgcaccccaccagaatgatgttctcccttgctcgtccaccgtattcacatttatgttgggatgctccaataatattttggcaatctcaaatctaccttgagctgacgcaaacatgagcgcagtaaaggagcaagggccttggtcattgatcaacaaagattcctcgtagctgagaaggagaaggacaatgtcgacgtgctccatgattacagcgacctgaagtggcgacgtccccgatggtcttttttggttaatgttggctgaattttgcaagagaaattccaccattgaaaattgtcctgcgcgacatgctaaccagagcggcggaaatgcattggcagattgagggtttttatgaagccgcggctgttggaagaggactttggccaattctaaggagccatttgcagcagccattgccaaaggtgtctggcccagcttgtcggcgcaattgaggtccaggtttgtttgccgtaagaggagctcagccagttttatgtcggaattgttcactgcataccagattgcagtgcggccattctcatcttgataattaaggttgatacatggacttgaaagcaaggcttcaaggataagtagtcttttgttgatggggagaaaacaaccgtgtcctttaacagccagaagcaacggagtttcctgtcggtggttgagacagttgacatcaactcgcggatttcgtacaagcatttgtattactccatagtcgcctatttctgttgctaggtgcagtggtgttcggccatcatggtcgcagatgttgacatttgtccgctcatcagacaagaaaagttggaacatataggtttggcgacaggtcagcgcaattgaaatgggcgcgtctccgtccagggattgattattgagatcaatattctgtacattgaggagtcgttggacaatgttgacgcttccatgcagaacagcgatcgagaaggcactttctcccaaggtattacgctgtatgacttttactgaatgatggctcaagagcaaatcaacagcgtctgcgtactgcagctttgtagccaacatgagaggtgtaaggccagaaaatgtttggttgatatctgccttttcccaacccagaaagtgctggatgatgcctaactttctatgttcgattgcccaatgaagtggcggggtgtcttggaagtctatgcaatcaaagaggctctttctgaagataacgagggatcctcgagatgcgagacacagacttcgaatatccttcacctccatgaatttcacaatccacaaaagtgattctagtggaagtcccaaaagcagcatcttggcggatttcgtgaacgtatagttaacgaatacctatagagataataatgaaaggagggctcagagtaataattcagagataagtttgtcaccgccagcagttggctgaggagcttgggagacgcattcctttgaggcagtggcttcttaaatattttttgagggcgtatcatttatacggatttattcaagtggagtcaagtcaccggcttctaggatcgcgatacttactcctgggatcctgcgactggtttcctaggagccctaacgatcccgggatatgttacaatgctcccaggaagcactcacccattcctgggagttacgcatcgtatgggatatacatgaagcatacaagctaaattgagatatgatctgcgggtcccacatggtgcatatgggatcccctccagcgaaagcttccacgcgctacgtcgtgtatctagagtggactatagactttcttgatgttgattattcattcggaagacgctgtcctcagaaacacccggaatattgtggcttgacatcaaagttgacgatcttataccggtgaggccgacgtttacaccgcgggaacgtcagcaatgcataagccctcaaaaaatattttaaatagagaccattggccttgaaaattagtatctgacaattatcttatttcttctacgagtgataaatcgtctgaaaacccaaaaccgctcatgcctccacagagaagacatgtggcgtcgggccgcccgaacccataccccttaccaatcgtttatcaaggtcagtctgggattgaagtaccatgacggttccgaattaacctaactcaggcacgcaacatgcaaatcaaaggctcgagggaatcattacgagcatatacgcagaaatgtcaaaaatacaacagaaacactacgaggcaactgttatgctacaaaactgcgacaatatgttacgggcccacgcaatggacaaggccgacttggagaggcagaaccagtgttttattgaacatatcaagatagctcaacaaaaagcttgcaacctagagttcaagaataaggaactcgaataccaactggcaaaagtgagacagctgcaccccaaacaaccagaagggaggcagagttaaaaatttactgttgaagttacaaactttgcccagttaccaattgaatgacgccataattgatggccaaatgaacaggagctataatgcccatttctgtggattaggacatgcgaaggatcattttgttgcggcgaccgttctgaaacgagattatgtgaaaggtaggcagtgccttactttgccttagcccgcacgaaacagactaggaacagatggaggcaatgtattacctaaatcagggtcgtttcagagttttgtatcaacacaatgttgcaatttcagtgtgcgacaataaaaagcatgagattgccgaccaatgaatccctttgactctgtctccctagaattcgtgcaagaacaaaggggagttcaactgaccctatgcccggattgccagctacggtgcttgctagattagttctgtgttgtaggttccaacgccatgacaagaaaatggtttaagagttcaataagtctgttttatgctctttacttatcgctagtcattcctagacggcattgtccctcccaggaacctccgagtctcccgggagcctgatacaagctcctagaaaccgaataaatgctcccaggaacggcacgggtagtcccaggagtccctgagctcccgggaacttagaaagaggctcccgggagattcggtggttcctgggagcgcatgtcgctcacctgggagtgcataacgccatcctgggatgagcaagtttctacgtactcgggtcgaactcgtagatcgctcttaccgctttttcatttttgtccacaggctaaccatagaaattgcaatcccattctagacatgtgaccgaggatataggttggtttcgacagtgctatgaggttcgatttgggcagcattttctttagaaggctatcttatgctgacataccatccttaagaagttgggaggaatcgcagattacgtgagatagctagagattaaatacttagcagatcactcaggagctgtaatataatacaaaataaaacatacatggtacgttacattacactcagtaattacttactaatttttcttgtcgtatgtggcggtgcagattatgtaactgtaatgtaactgtctgtttccatgtaataagctggctgtattgggttttcaccagaacagccaacaagttgcttgcattgctagtcttcacggtctgtgtcctgttgcccactgcagttattttccggataggttcaatcaaatacgactagaaataaggactcgactatcatttaaagggctatccgcgggcccacctaaaaaggaagctcatcatgcttcaaacttgtgcgctgaaagtgtagggtgtttgcccctcgagttttaacgtacatcgcgtttactctttagaaaaagtgtccgccattctgcagaaatttgagccatttaatttctaactgatcccttatttttgcacagctaggaactttccgatggtgtgacaaggagtctagttaggtcggcgagggttggactgcgcggctgaatagcaaattttgtacagactgatgataaccaagcacaagtgaaatattattgattgaaaaaatgactcagttgctctttcaattggcccgagatctggtgcgtctctgagaaggcttcaattccatccatgcctgtcgcagtaacgccatatcaatatccgcgaaatgaggcccgatctgtctcagggtcagattctgtctctgtaggtcacgcaactttcgtttgttctttgcattaagcctctgtcgaggcttgcagctgttcnnnnnnnnnnnnnnnnnnnnnnnnnnnnnnnnnnnnnnnnnnnnnnnnnnnnnnnnnnnnnnnnnnnnnnnnnnnnnnnnnnnnnnnnnnnnnnnnnnnnnnnnnnnnnnnnnnnnnnnnnnnnnnnnnnnnnnnnnnnnnnnnnnnnnnnnnnnnnnnnnnnnnnnnnnnnnnnnnnnnnnnnnnnnnnnnnnnnnnnnnnnnnnnnnnnnnnnnnnnnnnnnnnnnnnnnnnnnnnnnnnnnnnnnnnnnnnnnnnnnnnnnnnnnnnnnnnnnnnnnnnnnnnnnnnnnnnnnnnnnnnnnnnnnnnnnnnnnnnnnnnnnnnnnnnnnnnnnnnnnnnnnnnnnnnnnnnnnnnnnnnnnnnnnnnnnnnnnnnnnnnnnnnnnnnnnnnnnnnnnnnnnnnnnnnnnnnnnnnnnnnnnnnnnnnnnnnnnnnnnnnnnnnnnnnnnnnnnnnnnnnnnnnnnnnnnnnnnnnnnnnnnnnnnnnnnnnnnnnnnnnnnnnnnnnnnnnnnnnnnnnnnnnnnnnnnnnnnnnnnnnnnnnnnnnnnnnnnnnnnnnnnnnnnnnnnnnnnnnnnnnnnnnnnnnnnnnnnnnnnnnnnnnnnnnnnnnnnnnnnnnnnnnnnnnnnnnnnnnnnnnnnnnnnnnnnnnnnnnnnnnnnnnnnnnnnnnnnnnnnnnnnnnnnnnnnnnnnnnnnnnnnnnnnnnnnnnnnnnnnnnnnnnnnnnnnnnnnnnnnnnnnnnnnnnnnnnnnnnnnnnnnnnnnnnnnnnnnnnnnnnnnnnnnnnnnnnnnnnnnnnnnnnnnnnnnnnnnnnnnnnnnnnnnnnnnnnnnnnnnnnnnnnnnnnnnnnnnnnnnnnnnnnnnnnnnnnnnnnnnnnnnnnnnnnnnnnnnnnnnnnnnnnnnnnnnnnnnnnnnnnnnnnnnnnnnnnnnnnnnnnnnnnnnnnnnnnnnnnnnnnnnnnnnnnnnnnnnnnnnnnnnnnnnnnnnnnnnnnnnnnnnnnnnnnnnnnnnnnnnnnnnnnnnnnnnnnnnnnnnnnnnnnnnnnnnnnnnnnnnnnnnnnnnnnnnnnnnnnnnnnnnnnnnnnnnnnnnnnnnnnnnnnnnnnnnnnnnnnnnnnnnnnnnnnnnnnnnnnnnnnnnnnnnnnnnnnnnnnnnnnnnnnnnnnnnnnnnnnnnnnnnnnnnnnnnnnnnnnnnnnnnnnnnnnnnnnnnnnnnnnnnnnnnnnnnnnnnnnnnnnnnnnnnnnnnnnnnnnnnnnnnnnnnnnnnnnnnnnnnnnnnnnnnnnnnnnnnnnnnnnnnnnnnnnnnnnnnnnnnnnnnnnnnnnnnnnnnnnnnnnnnnnnnnnnnnnnnnnnnnnnnnnnnnnnnnnnnnnnnnnnnnnnnnnnnnnnnnnnnnnnnnnnnnnnnnnnnnnnnnnnnnnnnnnnnnnnnnnnnnnnnnnnnnnnnnnnnnnnnnnnnnnnnnnnnnnnnnnnnnnnnnnnnnnnnnnnnnnnnnnnnnnnnnnnnnnnnnnnnnnnnnnnnnnnnnnnnnnnnnnnnnnnnnnnnnnnnnnnnnnnnnnnnnnnnnnnnnnnnnnnnnnnnnnnnnnnnnnnnnnnnnnnnnnnnnnnnnnnnnnnnnnnnnnnnnnnnnnnnnnnnnnnnnnnnnnnnnnnnnnnnnnnnnnnnnnnnnnnnnnnnnnnnnnnnnnnnnnnnnnnnnnnnnnnnnnnnnnnnnnnnnnnnnnnnnnnnnnnnnnnnnnnnnnnnnnnnnnnnnnnnnnnnnnnnnnnnnnnnnnnnnnnnnnnnnnnnnnnnnnnnnnnnnnnnnnnnnnnnnnnnnnnnnnnnnnnnnnnnnnnnnnnnnnnnnnnnnnnnnnnnnnnnnnnnnnnnnnnnnnnnnnnnnnnnnnnnnnnnnnnnnnnnnnnnnnnnnnnnnnnnnnnnnnnnnnnnnnnnnnnnnnnnnnnnnnnnnnnnnnnnnnnnnnnnnnnnnnnnnnnnnnnnnnnnnnnnnnnnnnnnnnnnnnnnnnnnnnnnnnnnnnnnnnnnnnnnnnnnnnnnnnnnnnnnnnnnnnnnnnnnnnnnnnnnnnnnnnnnnnnnnnnnnnnnnnnnnnnnnnnnnnnnnnnnnnnnnnnnnnnnnnnnnnnnnnnnnnnnnnnnnnnnnnnnnnnnnnnnnnnnnnnnnnnnnnnnnnnnnnnnnnnnnnnnnnnnnnnnnnnnnnnnnnnnnnnnnnnnnnnnnnnnnnnnnnnnnnnnnnnnnnnnnnnnnnnnnnnnnnnnnnnnnnnnnnnnnnnnnnnnnnnnnnnnnnnnnnnnnnnnnnnnnnnnnnnnnnnnnnnnnnnnnnnnnnnnnnnnnnnnnnnnnnnnnnnnnnnnnnnnnnnnnnnnnnnnnnnnnnnnnnnnnnnnnnnnnnnnnnnnnnnnnnnnnnnnnnnnnnnnnnnnnnnnnnnnnnnnnnnnnnnnnnnnnnnnnnnnnnnnnnnnnnnnnnnnnnnnnnnnnnnnnnnnnnnnnnnnnnnnnnnnnnnnnnnnnnnnnnnnnnnnnnnnnnnnnnnnnnnnnnnnnnnnnnnnnnnnnnnnnnnnnnnnnnnnnnnnnnnnnnnnnnnnnnnnnnnnnnnnnnnnnnnnnnnnnnnnnnnnnnnnnnnnnnnnnnnnnnnnnnnnnnnnnnnnnnnnnnnnnnnnnnnnnnnnnnnnnnnnnnnnnnnnnnnnnnnnnnnnnnnnnnnnnnnnnnnnnnnnnnnnnnntgttagtttatgatggtctcagggaggaagttacgaataaaccaaccatttttatttcctttcgatcgtctgggatgattttaatttttgtgaattgttcgaatccaccaaagaactgttcggcatgcgcactcacggttcttaccgtaggtagcccatcatcgttcagtcgcccttgagtagaatttgcgtaccagcgaatgtacgccttgatcatctcatgagttggagccggagaaccaagggaggtttggtaatattcaaacccattctccgggtctgtagtgaaactaaaggaaggtcagcagaatttataataggaaagggattgccacctcagatgcggcttaactcactcgagccagaggttcatagtttcttgatgtaatttgttggtcttggggagtcttctgtctttctcccgaattgagtcctcctctctatgggccccagggacataaccattcttttctcgttgtagacggcgcctctccatggcgattccatcgcgcttggcaaaaaagtcttttctgcccataatcaagtgcggtgcgacctggaggtaggggatgtatgcaaagtaaaagaatgcgatattagattaatgtaccaaagaaaaggcgctaggcgtgttggttattacatgctaatgctggcacacggtctgcctttataattgggactttgagctcgagccgctctgaattagaagacaaaaggaagacatcatgaaacggatgaagttctccgctctttcctgcgccccttcgtcataatgtattttcttgatgaggtgcagtgcttcggaaaatgagggcagtagcaatgctatcaacgaactaactatcacagtataaacgaccctgtgggggctaatctcttccgggtatagtctgaggtgggctgagtgcatcagtgttgctcactgattggacactgagcatcactgagtaatcagagagcatccaatgagcactcactgagcactcactgagcatcagtcatcctgcacgtgactgatatgagcatgatcactgatctgagcccgtgctgacatctactcagtgagcctgagcctgagcaccctcataaaagcggcggcagctcaaataggaaagccccacccgccagggaatatcctgtacgtatagtggcctatgtaacggattttccctggagggtggtgatttcctatttgggatgtcgccgctttagtaagggcgcaccactcagactcaggctctcggagtagatatcagcacgagctcagaagggatgaactcagtacagtcacgtgaatgatgactgatactatgtaaatgcccattggatgctcactgatcacttaccctctgtgtccaatcagggagcaattctgctcaccatatgagtggaacagccccatatttcccttttcttattgcagtggggttccagagtaagatgactaaaccgccatgtgattaagggcactcccgaggcggagatagcaacgcagacacctctccacctttccattctcagtagccatcccatggtgtttcctctctagcaccctactcccagtaacgactctgatctcacacctgtgtcgcaggcagggctgtctgtgcccctgtccctgtagcagggtcccctcttcaatatgaaggtgaatatattgttagaatgccttgcaaaccaatcaaacaggggaataagatatttgcacagcaaagcatgactatatctgggcatttacatggccatagtagccgtatttggggtatcgcagagatttttcactgccctgatatcagccctactggtgcaatggtgcttagtatgatcaaaaagcttgctacgatttctcagtaaaacccttggttgcaaagtggatgtaaaagccggtggaaaagaagttgaagacgcagggtattgctgagtagcaggtagtcgcaaatcaatcctaggaagcttttcaatcatactcagcactattgcaccagtagggctgatatcagattagcgaaaaagctctgcgatacttaagacggctactccatgtaaacgcccagatagtataaccatgctctgctagtgcaaatatcttataacccctgtttgattggtttacaaagcatttaacgatattaacctctattcctgtatattgacttggtactgtggtactatttccttcaaacatggcccattgagccagccgtatcctcctatttcaggcttgccaatcagccttttggatactgtggtcactgaagccaccgagaagagaaaagatttgtaagaatatctcatatctttatctaattgtgactaagctgctactacgaactctaatggcggtagtcatttacttgtaaaggcagaaggcagcgagtaaaacctgctttgtgatgattaagtccttcctagtagccctcgtaggcccctcgctagagctaagatacaaactcagtcgcttcagtattctaatcatgtgtcacccttgggtaaacgatccccggcgccttcttcatcttttctttagcaggtaatcgagcactcggaatgcgccgctatggatactttgcatgtccttctttctttctttaactctagactgatggaggcagataaaattgacatatgagctgcaccgaataagatttgcatcaataggaatgtataacattaaaaatagctctgaaatcattttcaatgcgcggctgctttcaaaatgatgacaagttgatactcgtgaatggcttcatgctgcagaacaaccctcgatccacaacagcacagatttcatcttctctttctcccaaggacgaaaagcaagccaactgttccattctcatcattaaaccccccggggtacttcggtccttcaagaatctcctgtggcattttcccgatctggtcgcaaatcagggtcaaggaaaaagctagtccatcacttttgctgacatactcaacgcccggttcaagagcattatgtgcaagatggacttgcagtatgacgtggcgagctcttgttggaaaccgtgattgctgatggcactaatttctgacagatgatgatggtagaggtccaataacagatccttggcattaagcaccgcatttgtttgctccttgtatccggatttgccagacattaggaggaggagtgttttctcggggagctggtcacgggcagaatagtattgagataagctgcgcttcatatcatcaaaatcgcgcttcctcgggttcccgactctctcatatatacttttttttactttcaaagacccgaagactttccccatttgctttcatcttgctctctattgacgctttattccatgggacgagtatgtcccatgggaagcaaatgtcgtccaactagttagaatacagacgaggaagccggtgctagagtaataagagactgtaagtaatacgtataagaaaatatgtcattgaacttgggtttaattgatgggttgattgagattcttatacctgttgcaaccttatcaagtgcgtgatatactactccgttgtccttttttgatgaataataggtgaggtttagagggatagagtgcacgtgctgaagctcacgtgtcgcattttattgatgtagcttactcagtcagatgatgcttaatcagcttatgtaatgatctccgatcggatcagaactgttcagaggcgtgctcaattttacctgagatcaaagagcggcaagaggtgagcactaaaatggaaagggaaaggcattatccggtacatatattgcacaacatatgtacatatcgatgggctacctgacccttacaggttatgcaaatgtactcatatcatatgatatgattatgaaccatgtacggagtactttgggccttgaagatctgcctaatgaaagtccgggtgctttgaagtatagacataatttttagtgctggacattttagatggctgagatttgtctgcagctgccaaatatagttaccgaaggctttggtttagctactgtcctgtttctcatatatattgaattattttggactatacaatgaacttggaattcgttaaattctggttctgatttgacaaaataaatactggggatgtctagaggaagtattgttgtaatggcctgcaaaaccgtgagagatatatattccgtcgggaaagggatgttgacatcaaaagcgcgtaaaacgtagaaatgaggtgtgatcatgaaaccaccagctccaaaaagaaattcaacgcatataaaaaacaaacaattcagaaaacctaccaaaatgaatcaacaagctagcagagttaccccggcctcatagtatactctctaacattgaagcatcacgggatgatatgattagataagaacctcttatagtctaaacccctttaggactagtccgtcaaggctctacagaacattttttttcctgtccggatcaactgcgaaaccaccagcctaaacccccatttgtttcctaaggggcggaagaaaatagagtctcatcggaatccttgctgtttttatttgggcctggtctattgatatctatcttcacaccaccgcaccctcgactgcgagaaaaaaaaagaagataagaaaaaaagttacagccaagatgggaaagaagacgactcgcccatccaccaaggtcgcctcggccgccacatcgccggcatcgggcatgacatatgcgggcagcaagtcgtcgatcctgcgcgctgcgttctcaccatcagagtaccaattggccctgtttgcgtccgttatccaaggcctcgatggccagcacattcgcattcacgacacacagacaggacgcctccagtgtgagcatgccctggggccgaaggaaacagtgacctctttggactggggatactacggtggctcaggcaagggtcgtgaccagtcgaaaaagaagcgcaagcgcggttccgatgtcaatggggctgttgatggcctggaccagggggacattgtggttgcattcggcacaaacacatcggatatccgtatgtactcgccatccgaagataaggttgttggcaccttgaccggcgcgcatgacaagggtatcaaggacttcaagttcacggccgatcgacccgcccaggaggcttggagtatcggtggtgacaataagcttgtccagtgggacctgcgcaccggacaaagcacacagtaagtttgggatacttgctgggtaacaccgagctcctaactaatatacccgtaggacaatccacctcccctcatcctcagtcttcactgctctctcccgccccgtgccctcgaaccctcctcttatctgcgcttcccagaccccgtacttaatagataccgagaaggccgatgagccggttcagttcccggccatgcgcaaccctatccacaccgtcatttcgtcctcttccgagtctgctggtgtcggtgcattccttgcatctgatggtgaccgcttcatcaacgtctttgatgtcgcttcccagaagcttgttcgtaaccttgtcgccgaccaggaggtctcgtcgattacactgcaaacagatggcgctaccaccccggagaagcaagtgcttgctgcagttaccgcagatggcagcatcgaactcttcacaaagccatttgttcagccccaaagtgcgccctccgcgagtgccaaggctagccggaaacagatgacccaaaaagcaaacgcaaccctcaaaatcaccaacaccgagtcttcgaacgcctgcgttcctgtcgcagccatatcattccagggccctaacctcgtggttgcatacaccgagggtggtgtgatccctgtctttgagcgtgtcaagttcctcgacgaaaagaccgatgagctctctttcaccggaaccaagaccgtggtgaagaccaagtcaggctcagcactttcgtctgtcacaacgaatggagtcaagagtgcaggcgagacccgggttgacgaatctcgcatgaatgtcgagcagggtaacctggtcgatgatgatgtagagatggaggattcacgacaagacgcatccgactctggcagcgaggaggactccgatgacgacgacaacaagaagtccaaggcttcgaccgagaaaaagaccaagcccaccaagcaagtcgcagcgaacgaggacgtcgagatgcagaacgcatccgactccgaagaggaagaggaagaagagggcgcggagccatcgttcggcgaacttctacgcgcaaacgcaggccaggaagtcgacgtcgaggccgagcttgacgacgacgtcctcctgggcgcattggttcccggcaagccccaggccgtagtgcaacagatccctaccggcgtttcgctcgcaactgtcctcacacagtcgctcaagaccaacgacaacggaatgctcgagtcttgtttccacaccggtgacacctccatcatccgcactaccatccagcgcctcgactcttcgctggctgcgaccctgcttcaaaaactcgctgagcgcctcgcctcccggcctggtcgctacggccaccttctcgtctgggtgcagtggacctgcgtcgctcatggcggcgccctggctggtcatcctgatctcttgaagcgcatgacttccctctacaaggtcatggaccagcgctctgctaccctgccctcccttctgctcctcaagggcaagcttgacatgctcgatgcgcaattgggactgcggcaatcgatccgcggtggcgatgaaggcatggatagcgaggacgaggacaatgtcatctacgtcgagggccaagatgacctcgaggacagtgagactgaggccaagacaccgcggaagtcaatacgcgaccaggcttacgatgaagacgagtcaatgatgaacggcgtcgacgagtccgaagatgacgaggacgatggaagcgacgatgaggatgacgacgaagagcctatcttggacattgaggctgctgagtctgtcggttcttccgacgccgaggaatcgctggaggagaacgaggacgaggacgaagatgaggatagtgatggctcgatggttgacttcattgccgacacggaagacgacgagtccgacgatgctgctcagcagcagcccccgccatcaaagaagagcacgtcttctgcttccatcggcaagaagagcaagggcggcaggaaataagcgtgtctcttttgaagttgtacgaattagagatgggagaatggggtaacggcctataaaagaacatattttttattttttcccttcgatgcatccaaccgggtctgcatgtcattttttctttctttgttttatcttttgctttcgatatcttgtgcctctaccgagcgcctctgcgtctccatcaatgtctattgaatttcaccttggtatcttgaatatcgcttcttgtaaggaggtatacgataacccgtacagagcacttttctacacataaacacggtatttataccagcaactcctcaccccggcagggacctgcatgcaggacccgatgtctcggcactccttcctcaccgaggggaatcagcatggctgtcgtccgctcccgcgagggataggtagtgaagtgacccaacgcactgacattagcagtgtcgagagctagaatgactccattcttgccaccttcaatccaggcctcggtggtcgaattggggagcgtgatgtgcgctagaccggagaggtagaccacccatctagtgcggcattagctgattgcggactctataaaaacaaacaaacaaataataaaaaacatgtacaaatagcacatgtaactcattcagagtcattaatttgaaatagcgaaacaaacgcatgagggagaatatcactcactgcaacgcaggcgcattatgtctaccaccatcaaacccagccggcaacaccgcaaacgatgcgttgccaccgacatcccccaaattcaaggcggcggtgccaacctgcccgggttgagcggaagtttgaaatcccggcacgagagcccagcactctaaggtggagcgatggtggcgtgcgccgagaacggtcacgttgagagattgggcgaggattgccgagggaaagatgaattggatgagggtttgaagacgcattttgaggaaattaggagtgaattgtgtgagctagatgtaattgggaggaaaggaaatataaataagaagaagaagatctgggagctgatatatagttatggggggagccaaaagttagttttgtcgtagtggtccgatccttcgcccatgggagccgaagagaactgaacggcggtggagtggaatcagcgctcgcctatgagcggattggttcctaaaataagctagcactaatacagagagggcaatatattggaggaatcgtgtgtatgacatcgatgagagtacatagctactgtaggacagtgacgtcggatcgaaattaatgttaaacatactacggagtatacttagcagattggacggcagaaaacaagaaacaattcaattcatcgcaacaaagaatgataaacctacccaagttctgtcttgcagcattaaaccataaaaatataagcgcttaatgatagtgagagtaccccgtactcagacccaagaagacaaagaatactaacgaatgacttcaccaccagacttctcaatgccctcgaggccttcaagaatgtcgcttccaccgaagagtccacaagcagagtcagtgcttgttcttcttccggtccagatctcatggaatttcacggtttgatcactagacgcgacaataatgcatccctcctcccttgttcgtgtgcaccacatcccaccttctttttccttgggagtgaccatgctagcaccaaccctgcggctactgaccttgcggccacgggtcggggtctcttgttctggagacccagtctgggttgacgaggacgaaggtgaagatgactggctgtcaggccgagcagagcgtgtagccgagaaacgagggatttttcctggatatcgtactgcccacagtgctcttccgcagtcgaagttgctaactcgagtctcagggccatcccaggtggttccatagggcccccagggaatgacggccacctgtgcgcagctgggccaggcaaagacggcgattcgaaatgggtgatctggctgtgcataaccaaaagtagcggcgatctcgcgtcgagtcccgctccatataagactggttacctgcgcgaagacattgatggttgcgagacaagctccgctccgggtgtgatagaagtgtatagctttgtcattggtgcctccccccgtcgcgagcagggatgactgccatggcgcaaatgcaattgccttgaccgcagcggagtgcatcagacgatacttgtgacgaccgtatgggaccagaatagttcgtcccccaccggagatcacagtgcctgcatggtttaaaagcgcagattcggccggaggcttgactggagcagcaagccatgatgggagagcaggtcgtctaagaaacaatcgtcttcttgcggtgctcagaggaaagtatggaaatacaccgaggctgaagctgctaggagaatccgggggcgtgatgggtgggaccatataactcatctgctgtggcgaaacaatctcagccagctcaaagagaaggcaggcgttgtcattaccacccgtggcaaggtatttgtcatcgggtgaccatgccagtccacagatttgttgagtgtgtgcacagatcttggcaagaagcgtcatggacccgttccaattccacttagcttgatcttcttcgtcagaccactcgactgaatagtaccagatatttccaaagtcgtcacctgcaacaatctcttccacgtcgacttccatatgcatgaaccgttctgaaggtcgccgtgatgttctcggcttaaacgtcacacatgtaatggtactgggatgactgatctcaaaccggacttccttctcgaatgtgctccatagagacaactgacctgaccgcctggccactgcaagaatgcttcgctcgccatcctcagaagaaaatgacaaggaggtgacataatttgaggggtgcagatctggaaaggggggataatccatcccatgaccttcagaccagagatatacttgatgacctagacccacagcaagtatcccggatgttgttgagtatgcaagagtgctgcagtaaaaatcgtcccgaaggaaaggagcatcaaggattcgaaaaggcttcggtggaacaacctcttttctggtaggagataagggccctgagaatcgatccgagtcagttgatgccttggagaaggctgcggataccgccagtctcacaattccaaaagttgggttaagaatatcatatatgttttatctgtaaatggtaaatgtattccaaaagtaggctcagggggtggctgttgatgactacaattgcacttacaacgctccttttcaatttgcttccaagcactgtccttccattcaaatggggagaggcgctcgaagtctggagatgctggattgaggggggcatccagataccgcagacaagtagtacctagctgtctggtcgtcgggtcgattcccaaagcaagggcaagcctcgactcatgtatttcttgttcactgtacttgggttttctgggtaaaaaccgagccacgaagactggggcagatgatccattggtcgaagtgctcggcgtttcatgaggagccacgacaagggaactatcgaggactgcagatgctccacccacgttccagactgcgccggagctgacctgtctcaaagattcatgcgtagtgttgttgcctgtgatattgccttcagtgactagacgaggccgttgatgtgggatctgctggagtcgagttggcagctggggtctgttggcaacataagccctacgtgggattgtgggcagaaatggatcatcaccgggaggaagtcgtcgaagtagtctctcttgaggcgaaagacgctgcggatgcttggccacacgaaaggttgttgatgttggttcctcgaagtctcgctttggaatgaatctatcaggcgacataggacttcgaaagaaacttcttgctactgcatttccagtggttctcactctgctgcgacctcttttgggtgaggagacccggttttctttggaacgagggacgggtgtcagagcatgttgggtcttgggctttgacaatgatgattgagaagtaggtgtttcaaaaaatggcaaattgatagttgcaaattcagttaattggacaggtccactgtctctggaagactcggatcgagagtgcgaagtcaatggatgtttgtgactgcctgtagaggtttcctcgaaggagtgacgttgcatatctaccatggttctggatgcaggtcgataagttgtatatgattaatgacctagagctaaaaaaggaatgtataaggaggcctctctttcaaggcatagcggcaagatgagaaagacgacgaagcaaaagacaagtccccaaagtagaaagagtgatgatcacgtgaagctatgcagatgccggggagcttacgtaatttacccaccgcatcatccatggatgcaccaatgagataattctagttggccacatctgatcaacacaaagcaacctacctacaaggaaacaccttctatttatttcttattgtcaaacaaagagtgaaaatgcccagtgtgagataattcccgcatgctgtaccgttccgaggctgacgattgcgatagcatggtgtgccgcggtacaaaccagctgagaagtccgccgaggcgcgacagcaagagctgcagaagatagaaaaatacaaggatctcgagatttctgtatccaaaaaggttggccaccttttagagctcacctataaatggagtctgacctaggacaggtggctgagcatgagtacacaatcgagaccttgaacaagatctcggagctgctgtctagcaatccagaatactacacagcctggaactaccgccgtctggtactacagtatcagttctcccaagcagggggctcggataatgagactgctacccattcaatcacacagctaattataaatgatttacatttcctgattccccttctccggagcttccccaagtgctactggatctggaattatcgtttgtggctgttggatgaagctcgccgtctactaccccttcccgaggcccgggaaatctggcagcaagaacttgcccttgtgggtaagatgttgactctcgatagccggaatttccacgggtggggttatcgacgcttcgtggttgagactttgaaggagcttggcactgccgaggaagcaacaagcatgacccagaaggaatttgaatatgccacgaagatgattggagccaatctttccaacttctccgcgtggcattaccggacaaagcttatccaatcccttttggatgagcaatctgccagcgatgacgatcggagaagaatgttggacgatggttggtctaacctgtcttatcagagactatcttatactgatttttgtttttagaactatccctcattcatcaagcattcattgatccttatgatcagtcactttggttttatcaccaaaatctgatgagtgtgtttgacccgtcgatggctgaacgaactatggcccccaatttgagctcgtccgaccggctggagtacattagaaatgagatcgaagagatccaggagatgttggatggggctgaagactgcaaatatatctaccaggcattaattgagtgcacccttctcgcatccaaggtcgaaggcagcttgtcttctgaggatcgggaccagattctgagctggctctcagaagtgaagaaactggatccattgcgacgagaaagatggcttgattttgagaagaccttgtgaaaatatatgaataggtaacctaagcctgcggccctgtcgtgtctttttatttgtctttttttccggtattgtagtaccagcgtgttgctatctgcatgattttctggtctatgactctacggatcggcgactatctgctgtctgcattgtttaattcatagttgttttacttcatagattatgccacttgatggattgtttgctaaatagctaagcgagatgtttcgaggcttacaatgtttgcaaaaggtcagctatatcaataggctgctttccactttgaatttgtttcttctttccttctttgcaagaccaagcggccatgtggtataaaagcaccctgaagcagatcttccaccttcttctcctctgatgcccatggtgttctcctctctctaacaccctgctactctcagtgaacgaatttgctcccaccgtgtttcgcaggcagggctgtcggtgcccctgctgcccccgttgcagtcccctcttcaggattttcttaacgttcaccctaaatatatactacctgaggccactaatgatgcatcaggactatttgtgtatagagtttctttatacttacaggggtaagtatcaaattcgtagcatatgagtttgcgggctaggagtcctcttacctatcagcaccctccgatcgacctttaagattgcgaaactctatgatagcatagagaacatcacgtttactttaagggtctttcaggtaaaaaagttcaatatcacaatagtagaccgagtccagaaggtcttctaacgatatacacttcggaagatcacttgcaaaggtttaagcccgtttgcgtttactaaggaatgagtggttgggtgagggggtttcttatagaagtaagataccggggcgacttccagtaaaagcagactatagctatactgtagcgaactggacaaccatacttccattacgaaaaaacctcgaatggacctagtggtgccggtagagcatacagaagacatctatatctagagtattcttatccttcgttcgtcgggggatcttgcgctcgaccggaaagggaccctctagaaactatgctatcattagccttatctcctctatacagaaggtatgatcatactcgtcgcatctgtttgtgggcgtccttattgacacggcggtgggcaaatagctcgaaatactgataaaggcgtcgccagtactcatcataagactacagcctttcaattttttaatcctttcttttattccggtgagaataataacatcatcgtcatcatcatcatctcgcgtttggttctacgaggtcaactaatgctcccgtggtcaccttgcaagtcatgtgatctcagcctactacctcaccgccgccttctctgcaatggtgcaaccaatgattatagcattaatattatatctatcttttttgatgtcttttgtacaactttttaaaggatccttatatgtacaattgcagaggtagatgtaactaaattgagaatgagaggccacttctgcaaacagtgcaaacaaacaaacaaacaagcaaacaaacgatcaacgatatgtggagtcacatgactgacaatcatgcagatcgtatcgaccagatatgtgtgtcactatttctatgtacagttgtcttggccagagaaaattagacggggatctacagggaagaccggccacccttgtacggtagtctctaactgctggtatgccatatcagattgaatttgacctgacaaacatgccatgcaagtacaagtagaacacagacctaagtcgccaattgtatccgttaagcagtgtttgctgcatatagcagacgtcgagtgtctaacaatacgaaatcacaatgggatatacagctatttgaatgtggagatggtgactcgttggggcaccaatcagcgacgagtgtacctggtcggtcgaatcgatcacttgaaactcaccaaaccccttcaactccttcctcgttccatctttttcctttttcgcgaattccacttgcgatttttgtcttttagctcttccgagcgtctgctctcttgcgatcctatggggtgttctattttctgattgttgtgaggtcatctaaacagctatggccgatatgtcgacacctaaacaaagtcccgaatacgaaggggtaagtggttcagattcagatctctccaaaaccccagcttgtcttgacacgagcttatcgcccttcgaataggagtcttttgacgacgcccttgaaaccgtctcaatccaggagaacaacaacctcaacgtcatcatccccaagtccacttccacccgatcgttgaccgatagtccggcaattggctcacatatgtctccggaattgacggagaaacctccgtcaccttctgaatcgcaggccgagcagaagagtgagaccgccgaggagcaaatcagggatggcgaggggctggatggacagaatgataagaacaataagaatatggggaaggggcaagatgaaggaacgggtactagcgatgagaataatctcgacaccaaccacggggtgaacacagcgaccgatgagcccacccggggtgataagccggaacaagggtccgaggttacgcagacagaggtcgagaagaacggagaagatcacgatcagagcccactgcagaagtcgcctctactcacgtcccgccgtttatcaacatcatcatcgctcgacgaagtgaacctgatgaacagcaaggaagacgagtcgacacacaaggcacagcgcccaggggaccaaacagaaccgcctccgttgcctcctaagaacgatcccgctcctccggcaagtgcaggcctgatgggtctgtcgggtggcctgccctcagtcccatgggcggctcctccagtgaacaagaatccgcctattccccagccagcccatcctcggaagcctagtggcccctttgcgtggttcactcgaagctcaaccgcgactaatgctaaggacatcaaatccccacccccctctgccagccgacgaaacactgccacctccgtatcgaccctcagcagcaacctagaccatctcgctcgtgatggcgacgacgtctccagtatcggctcaaagaagccgagacgcaatagcctgaaggatcaattcaagatgctacgcctacgcgaggagagccatgcgccagaggtcgatcagacgagcgtgcaatcgggccaagccagcgttagccagtctggagctagcccccctatcatcccagaggaaggagaggatggcattttggtagcgtcaggagtcgtttcaccttcgaggacggtcggtcctgggagaacgggctctgtggctgatgcttccatccccgtggactgggagatgtggcagcaccttgtgaacaacgggcccaaggccttggcaagctcagaggaactgaatgccgccattaaacgaggtatcccgcagacgatccgaggagtgatttggcaaattttggcagattgccatactggcgatatggaggatatctatcgagacctcgtggcgcgtggcacagcacaagacaaagatggacgaacaataaatggcactgaaagttcgtcatcacgctcttcagtccgctcccacccctcgggttccggctcacggtccagcagcgctgcccctagcccgcctaacgaaggagaaacagataaattgtgcaaggaacatacctccaatgacgccgaccgtcttaagaaagcaaagatagacgccgttgcgctgcagaaattggagaagaccataaggcgagacctgggagctcgtactagctacgcgaaatactttgtttcccaaggcagccaagaaggcctctttgggctgtgcaaggcatacgccctgtatgatccgggagttggatacgcgcaaggcatgaattttattgtcatgccattgttattcaacgtgagtataccctcaattaggttgactgagcttatgggctgacgttttacacagatggacgaagtcgatgctttcgccatgatggtcaagctgatgaacaagtactctctgcgagatatgttcattcaggatatgcctgggcttcaccgtagcctataccaattcgagcgactgctagaagacctagaacctgctctctactgccatctccggcgccgtggagttcctcctcagctgtacgccacccagtggttcttgacgctgttcgcctaccgtttcccgctgcaactggtccttcgtatctacgacctgatattcgaagagggactagaaaccaccatcctcaaattcggcgttgcgatcatgcgacgaaacgcagacgcgctgcttgaaatgaaagatatgagtatgctcactactttcttgaaagagcgtttgttcgatgcctacattgacaagcagccatccacctcgtcaatcctagagtcgggcttcttcggaagctctggtgcctctgataaagagatttaccgatccgacatcatggtacaggacgcttgcgccattcctctcacgtccgagatgctcaccgcgtacaccgccgaatgggaggaaaagaccaaaaccgagaaagagcgtgaagtcgagctggagcacttgcggcacaccgtgatcacgcagggcgcacgtgtccgacttctcgaggaacgtgccgaagcatcagacaaggagcatgtgcaattggcttccgagctggtgcacgtgaaggtcgagaatgaggagctgcgcgacctcaaggatgcgctggaactccaggtcggccaacttaagaacgtggtcgacaagcagccggctgaagtggaggagaagctccgcgcagaaatggagcggatcatgaagcggaacatcgaggtgcaaaacgagaaccgtgcgatggaagaatcaatgtccgatatggagaaggagttggttgccacgaaaatgaagtgggcagaggtaagatattttatcattcagcgtgagatgccgagactgacgagctcaaacagatttccgaaaatcacgagaatctccgccagaaatggagcgacctgcgtcgtgccctcgactgattgtcacaacgttgcttctattagtactccacccggatagcaatattcggttctgtatatttggaatgcgcagatgtggtagcgaggatctgcgatcacgtcctatcctgcgcatttgcaccatgcttatgggccgggtcaattacttttgtcctgatttgctccctgtacctgcttttctccgttttgagccgacatcatgatttgcccctttacgactcttttctccaagctctcagcatgccatttttggaaggcatcggtgtttcgctaccttgtgttgaattatatttgctctagtgtgtatgtctatctccgatcctcgggcagggcgtactagacgtatgcatgtacatcatcaatggactttgttcatcctattatctagcttccgcatgtggccagctctctaccttagctctatactctctttatacgaagatcgaacatgcacaaatccatctctcgattctgactccattacagaatattctcatagtaactcgtcaacacatcctccttgacaggcgccgcacaagccttgagagccttgtgcgcctcacactcggtatcataatacttcatatcctccatcgaagcaaaagtcgtcttgacagacaagttgtaccccttattacgaggatcagggatcgaagcgccaacagcagcagcgaggatgtagggtttgccgtcctacaaacagaaaaagaaaacacccgttaataaccgttcaattgcgtttcattccgaatctcccgaatgacgactacgtggtacagcaagcatagtacagcatagtacatgtagccaaacagcgcagacaatgtagaaaagaacaagatgcactcacctttgtagcggtcttcgcgaggaccttgtactgctccagcacgcggtcgcgatccgcctcgttggggatcttgaagagggtgattcgctcgataggggccattgtttttttgagggtgtgggaggtgaggagtcgggaaatggacatggatttcagattctgggggaattaatatgaatttatacgggtttatatggcggggttacgatgggttcatatatgtcattgtttctgatacttccgtcgggttgtggggaggagccggagtagatccgttgattcatggtttgttaattatttccgctatttttgactaggttggtattgtttttgattgttttgtatcttctgtatattctagatgtctctctcttcaattgagagtttctttgctggggaaatagggcggaatattcttggttggagagcgcgcaatttccgctcgggtatttggtgtgcggaattggatattgaaggatgatgggattgtatttgtatatgcgtatcggatggatattgaggggcctcggtatattatttgtacaccattgccatgctgtggaacaaactacgcaagacatctgtatggcttactatatggcgcactagaggcatagggcatcgaccgaggaacttattagcttcactttataatacccggaagattgactagagtcctagattggatatgacatggtccatcgtatcaaacattcgctgggcactggtcacagattcccacgcaaagcctgttccctttcaaaggcctcgaacaaactcttgaaattcccagccccaaacccatcaaaggaattccgttgtatgacctctatgaacaccgtcggcctatccccgacatgcttggagaagatctgaagcaggtacccgcgctcgtcgaaatcaaccaagatattcagctgctcgagtacgtctacatcggccccaagcgtccaggacacttgtgtcaggcgcttccgcaaatccgcgtagtatgtagctggtacactgaggaactggacaccgcgcgcttggagactagttacggcagcgacgatgtcgtgcgtgcggaaggctatgtgttggactccggcgccgtggtagtagtcgacgaatctgcgaatgttagaagtgctggtatgtgggtggcgtagggcagacgagaaagaagaaagaaaaaaaaacagggacaagttgcgtactcttcaatctgtgatttcttcttgccggttgcgggctcgttcataggcatcttgatggtttcgtttggtgaagcgatgacaattgatcgcatcgctgagtactcgctgcacatgtctttatcgtcgacggtccagtagcgatggaagtcgaggcattcctcataactaaagctggttagcgacagtcaaacaagaaccacattaattctactcactattggacaatgctgtccactcctccccacgactgattcccgacacagtggtcaatctcaagaaggttgatgggtggcaaaagctgtgtgatcggatcttcgctatcgagcaatcgatacccaggcaagaagggagcacctgccgaatacctctcccgattcaccagagtatgtacggtatccccgtacgtcccaacagtcgcagagacgatcgatccatgcccctcgacagaaaacgtccgcggctcagtgatagcgcgagcaccgttccctatagcccggttccatacagcttgtatatctcctgcgatccggaatgcgacatccttcaccccgtcgccgtgtatggtcaagtgcttatggatctcagccagcatcgcccgctcataaatcgaagcctggcgcaagataccgtcttccgggtcttggttcggtgggccacaaactggccccgtaagaacaaaagtagcgtcgctgttggctacaacatagctcacaaggtagggcgagccgttttctgggccgcggtatgcaacggggcggaagcccatgcgagtaatccagtatgtggcagcttgtttggggttgccgacgtaccaatggatgtgatcgaagccgacatattcggggcccatcttggcgggaaagatgtcttcattttccgggacggtcatgatcggtgctgttgattgtggctgcgctaatatcggtgcaggtgtggaccgagaaacatgtcatccctacgccagccgttgagccggtgtaaggcggggacaagttatttatgagtgattttgaaaacagctgggtcggtgttgaggagaaaaatagaattctggcgaggaaatccctgcccagacgtgtcacattccaagcccgcgtctccggatcgagaggctatctaagataaacgtatgaggcaatgctgaagtcatccattaccagagctttgtccttctttggtgaaccttggggggttcaagttcaggcttgtatacccacagaagccgaagtgatgtttttgcacaaggtcaatgctgtagaaagaagccgctgttctccgtagcaaagcgcgaggccatgtcagttgggctggctgtgcatgtcgcaaccctttcatccaagtcctgcggctgtatgtgttgtacacaacatatgccatttccagatcccatctcgctagtttatctcattccaaggcgaaagtaaaatccccaaatcagcccaatcaaacagttgtcacgggctccggccgactcttgaagaaaatcttataccgcacaatctccacaacctccagttcctcgctctccgccgcctgtcgtctctgtagcacggcaatcggccgcggcagcttcttgacttcgccagtcatccgctggtaccgaccgacatacatgtaagcgcgcttcatccattttgtgtcatctgggttgtgaaccgaatagtctgggaacatgagttttccgatcggagtttcgaaggtggaggctggattatccgtagaggtagagtagtctatgtcatcttcgtcccccgaggggacattgattgtgccctgtagttcgagaagggctaggcccgagggtgtttgaaggagtgctggaaggggattattcggtgttgaggcagtcgtagtcctttttgctgagccagagcaacgtggttgtagctttatggagggcataatgtagtcttgatgtttcaattggagttgaaggaggaaaacgcgaacgcggcacgcgtttgggatttccccacttcttatcgcgagaaatgggtaattatgggattacaagcacggaatataactatgatcacatatattatttgtaatactgatgcttgggataagagtacgtacatgacttgagtacatcaataactagaccattgtgtttgttctcatgtcatatcaggtaaacgcatagtctttgtctaaagcccgtccaggaatcaagagttatatcgtagtagaagtaacaatgaggtagctttgctacaaatcttgggcttaagtgtggctccaaactaatcgacaggagctttagtgtaatataagcattcttccgaggccatggccaagatttcgacatgtaaataagagtggaatgtaatagatggcctttcaagagaacaattttcgtgtgattgccacgaagcgcaattagctcgaccctataacatagctctggaggcagaaagtggtgaaatacaggaagcgttcagcaaacatagagcttgatacctgtatgaactgccagacaactctcggaattaggattcagacaggaaagcgcccgtggtattttgcattgtatctgtatatgatttatattagtcgaggtatttttattgacattgagaccataccaacagttcaggggtattcaaataacaaatgggcacaatacacaatgcataatgagcagaagcatacctctcaagaagcgctattcttatagcaaacatcctcaaggttctgcaggcccttaatagcctccccagatatatcttcggcagtcctaggaccctgtaatttgccgtaacggagatcgctcatatcaccaacagtcgtattgagctgagctaaaatctttgcagcctcttgatcgatcccagcaatttcacgctcgacattagcgctggccgtctccatttcagccaggagactagctactgagtgataatttcccggtacagcagtaggtggttggccaaacagatgaacatccatgtccatttcacgctcttcggaacttgaggcttcgactccagtggctagaatggcttttcggagctccgctctttgcgtttcaccttgcttgatctcgttgtcgatgttttcattgactcgatccatgtcctgttctcggacctgttgcagctcccgatacaaagtcctgatgtgtggatgggatctcaagcgctttgggaagagctctgtgaacttttgcagcgagatgactgttggtagcggggctggagagagcaggaaattgctcaggatggactcctcagagggaggcatgatgaatgtgtatagtgtagtacacacaatatgcagagtatagtgttctcttcttctcacaactgtggtgtagttttgtctcccgtttgacgcgaaccggaagttgaaaatattcacgtgaacaaaagaatatgaaaatgaatagaagaatggaaatctattcctattgttatggaatagtggaataaacagacgaatagacgaatcgttgtcaatgtcaaggtgacaataagctgccgcgcttaatttcttccaaggggccactcctcttcgcttgttttccttcttcttcttccactctacttcgtctacctcgtctacatctacatcaacttgcctcaaccccattctctcttcctaaaatcttgactctctctactattcctgagctggtctcgagtctgatctattcttgttccttcttacaccttcttctactttgctgaatcggatttgctgtcaagaacaacttgtactgccatttgtgcatcttcctttcttcctgtttttgctcaagtctgcatctagctgcggtgttccaattgaagtctctgaaggcttccaaggattttctgatcgtggctgttaccgcctgtatcatacctttccctgcgagacaggaatcatcttgacatctctacacctttgagctcaaaggtctacaatctgtcatacaagcttcgacaagcacgtcttctacctttctctgacaaaatggctcctatttctatgtatagcaaagacgagaaggtcctttgcttccaccatgagatcctttacgatgccaagatcctggatgttcgccacaaggactccactgacaaaaagagcccctttgaatatcaagtccactacaagggctggaagaatacgtaagtctggcttgtttcatttcttcccctgtttatctacgtcctggcggtgtcaagatcgttcccctccaaaaccttggaaagtttgtccgggccaatacggaagacttgaactcgactttgagctatgcacactctctgttatgcagaattgcgtcttgttttctgccgcacatgtttcagaaaagaatatatccatcattcgatttcgtggaacattctaacattggaacagctgggatgactgggtcctggaggaccgtcttcgcaagcacaccgaagacaaccgcgaattggccagcaatctgcgtcgggaagctgaagcttcattccgtctaaagaacaccaagatcactgctaagaagcgtgcgggttccgaccgtgactctgtgcgggacagcgaggagcgcggctccgtgcccagccgtggcaccaagcgagcccgtgatagtgaaatcgaaaaggtatgcaattaacacatcaaatcgggtgcaatggaaccaaacccaagaaaataaaatacaaaaggaccgtattatttatgatcccatactaacaatcttcaggaggagagcttcaatatccgcccctctgtgcgcatcgtcatgccagacaatttgaagtccctacttgtcgatgactgggagcaggtaaccaagaaccagtgcgtcgtctctttgccggcgaagtacccagtccgccagatcctgcaagactggcacgaggaagagctcccaaagcggtcgggctcgtcggcagacgaggacgtgctggaggaagtggtcgccgggatccaggagtacttcgacaagtgtctggataagattcttctctaccgccacgagcgcccccagtaccgtggcctgcgtaagaagttcgaggccgctaccggggaactggccgataagggccccatcgatgtatacggggcggagcacctgatccgcttgttcagtatgtactcaccttacttctgcttcaactgtgagagttgggaatcgtactaaccgttgcgtgtgtaggcactatgcctgagttgattgctcagaccaacatggacatgcaggctacgaatcgcctgcgagaggagatctcgaagctgtccatgtggttgagcaagaactccgagaagtacttcgctaccagctaccagccggcggagagcactcactgagtgcgagaagaagcttctcttgggggaggaaaggggcttctgccccttttctgtgttgtatgcgttggggtgagggtggccacccttccagcagcagcttgtttttttttttaagattttcgaagaagcgcgggcctgaatagacctggaatacaagagactttgcttagctatatcttaatctccaagaagacgtaggttctcatgagattggagttacgatctgtactagtagttgtgagatcaaaccctgacatcttgatgctactactcggtagttattacagaagcaaggcaataatgagtcgatgctgagataagagaaaatatgaattttcaactggatttcttaatagaaaactcaatgataccactacctagtgatctatcaccgacaaaactcttgaattcagatcaacatccaagatccacaaaattagaaggagaaggaaatgaacaatccaacaatctaatctgatatctaagcaaccagttgccttgcatcatcaacagcccaccgcgccgcacgcttcaattcactcttccactccgcctcacgccacttaacccaagcattcaaaccctcaggcggctggatactcagcgtatcatagccctgcttaattatacggtggacctcacgcggggagagattcttcttcctgatcgacggcaacgccaccggcacaggctcatcgcctttgggactggcagccgccgccgccgccgccgcagcagcagcaacagcagcggagtctgcaccctccgaatggaagagcagggtgtagaaatgcgtagatactgagaggagggtgtcgatggctgctgaatgcagctcgttgggttgagagattgcatcggctgcgattgcggtattggagcgggacagtgagtatgcatcgcggaatttggagataatggggcctgtctcgacaagcttatagaagaggtcatcgtaggaggctgggtctgggaggaaggtgtcgccgcctgagacgcagaacgcgattaggtctgcgagggaggttgtgagggtttggattttggggctgctggttaaatcggaggcgtaggttgttaggaagcgcatgagggagagcagagtccgccagagctcggaccagtggtaggcgaggcggatcttgttctttgagaggtaggttaggaggcggagagtgattgcgattgtgtggctgggaggcttgttaggaatggctaatggatacagtggatggttgtttcgtacctgtaaatgttgacgtcgaggcgccggcgaaggttatgcgtaatagtatcgatggcaatatcaaatatgacggttgcgaggacccgctctccgctgactagagggagatagggctgtttctgtcgacagatgcgtacctttcgcttgacttcctcgctgcaaatttgcttgcagatgatcgggtcttcgaccagaatgcgaagtgtgaataggtttagttcggcatagtgcccgacccgcggggatcgatatgcatgttgaagaagataggaggacaatgataggaagctcgaaaaaggggcttctccatcgctggtttctggtcccagatgaaccaaatgataaccaaagagcttattggcgtttgtgaagtcgtacgtggccattagaattgcggcttcatgtgccggactgccaggattgtaagtttcgaatcaagattctccgtgcagagaacttacagatcagcgaacatggccttcgcttcttccgccgaaggtgggttcgctctatccctggcgcccggtgcgagcgctcgtagtccaaaaaagattaacgtgttggtgaagctccagccctctggaatatcatcctggacagcaatatagccattccgcaggcgattacaggccagaccgacacccttggcaactttttcaatgcttgactcgttcacaaaatcatcaagccgaagctggtaggggttttggaattcaaacttgttgtagttggccaatagccccagaaggaggaatggatcgaacacttgcagcggggtatcagaatcagaaacatactattagcgactgtcagttattttcatatataaacaatatgagtaactcaaaccttcatgagcgacgggaaaaggtccctgtgtgtaagataggagaccaggctagttttgtatgctccactagtcatggcaatggccgtcttgatagctttgagccgcacatcgactggaaaaattaggatcaactgatatgatctcggttaagagcagaacaagcaatgacttacagctactgccattgcgaatgattctgtccaaaacggccacgaactcggaaatgacatggtccacttcgtcgagtcctgcaagaacagtgatgacatccgaacttgggtttgtgtatttcttgctcaaaatgctcgtcaagaaaacagtcaaggtctgtgaaacaaggttagacaatatgtgccggatattgatcacggggttcttacatctaatgcataagaatccgacggggcaaccccagctgctgcctcgcgagtggcacggacaaagaaacgccgagtttgaatctaggggttgtatcagctatttgattattgtcttgggcgctttttgtatcatggcttacctgtagaccaatagtatcgtctgggctcaaatggtctaggatagcatgtagttgtttccggtctggaggcagcaagaaaaattctctccaaaagccctccgaggggtctgcatcatctgctacctattaggagtattgttagcaatatttcataaagcgatgttcatacccgtactttgaagagattctcatagagctggacaatcttaggtttaaaggactcgggtctactctgctgggtaaggggtgaggcgtccatgatattagacaggatgatctgcaacgttaggtcgccagcattggacctcgagaaccaaaagagtaaggttaatataaagtcgagttgattccaattgcttcgaggttcataaaaagggacaccagccactttgtcagccgatccagccacatgtcctctacacttggcaatgtgtttacgcattgggagaaaatgaacaaattccagtatattcgtgaattaacctagtggatctatacagttcataaactttacatcttgatccttttccccgctactcagctacatttagaggtgtgggtggcatcttcatgagagagccatgtctctccgaggaacggaatgctccgcggtgtgggatgactcagcttccgaaaaacgcattggatgacaacattggaaatccaaagcagatcgcagttggaacttgtcattctaccttggtagctggattaaatagggcaaagacgaatcagctcggctcctaagtcagcctcttctcctgattagtctataattagcaaatcaactgaaactcgagcaatggcgccactgctgcactgctgttgtgtagaaaccactcgacgctgattggctgggtttgcgtcatgcaacgatcttatgtaatccacttgccatgggggaatcctcaaaacagtcagagattcttctcaactttattactcaatcctccattccaccatttttctcacacaacatcctatgatccaatagcaatttcgtcgaggttcactcccattttacattgattgcccctcgactatgagcttctctaccaccatgcaacgtccagtgacatcatccgccacactcctccgatgggtaaagccctcggcaggacgtctgcgtactttctcctcatatggaaacgcttacctagcctccaagcgggatatgcaaaccgcaactgcctaccgtcctcactcgctcccctcctcattcccgcctcctcgaagcaccggcggcgccgacacttccatttcagctgaattcccttccgacatgaaatcataccgcaacacatcacaaggcacattgtccaatgtgagcctacgggaaggcgaggcgcaaaaatccaagccgacttccgcttctccgcccgcctccaagacttccccgaaaccccgtcggccgctccggccaagaaaggccgccatgaaattgtccacattggccatcgagcagcttcgcaagttgatggcacagccggagcccaagtatattcgagtcggtgtcaagaaccgtggctgctcgggtctcgcctatcacctggagtacgtggagaagccgggaaagttcgatgaggtagtcgagcaggacggcgtcaaggtcctcatcgacagcaaggctttgttcagtattatcggcagcgaaatggactggcaagaggacaagctgagcagacgattcattttccgcaaccccaacatcagtaagtggcccctgcaagaattacagcatcctctatagattcgatttactgactcacgattacagaggaagaatgtggctgcggcgagtctttcatggtttaagcacacggcttgatcattccttttgatatgtttcttatacaggacctcttggcgtctttcttctcggtgcatcggacggcgttttcaaagggggtctgggattccacgaccaccctcttgtttgagtatatacgcttgatatccagttgataccttttatccactttctttctgcattttctactgcgtctcgtggtcactgtgggctcacaagtggcgagccatgtcaagagacaggctagaggctcaaccaacgaggtgctggcttttctttctctgcggagacattcttttgaaccctcgcaagatcaaccatgtgatatatttgtgtatagattagtccgaaggacattgatgacgacatatgacatatatttagctcaaaaaaatcaaaaaaatcaccataaacatgttttctcgataatctattcttttctccttcctattagcttcctattagcctctcagtatagtagaaaagtcatagtatacggttactgtctagaatgcgtcacctgactggatataagccgaggccccggaatgggctgagcgccgcatctcatacataccagtcattgcttgtatagagcggtctcaatccattccacatgagagcataggattaactgttacctaaaacatgacctcacccttcctctctccatacgcagtcggcgaaccagacaccgagccgctcctcatcaccgtccgcttctccgcctcaatccccgacctccaactagacgtcccagagcccgagaccacaacaggcgcaggtctaaagcaactaatccgagcgcaactcgccaaacccctgtcatcccaccgactacgcctcatctacgccggccgcggtctcgaagacacagccgcattaacagcctcactaaagctcccttcgtcaccaagccggagccctcgccccgtagcagaccaacccgagacaccagaagaaaatggcaaaggaaagcaggcggtgcgcgatacccgcccacgaatttacatccactgctcgatcggcgacatcgtactctcagacgcagacttagctagcgaagcaagcgtgtcatcaacgatccttctgcaacagaagcaacagaaaactaacacaggaaagaaacttttcggcaaggatgtctcgacatctcgtcactcccagacccagacccagacccagacccagtcccagtcaactaccaccacacccgcaccccgcggtttcgaccgcctcctctcggccggcttcacggcggctgaggtcaccgctctgcgctcccagttcctggccatgcagtctgtttcccggacgccggatactatgcctactggcgaccagctgcgggatcttgaggaccgctggatggatgaggggtcgacggcggcgcaggtgcagggtgggtttggggaggggggtggtatcggggatgacgagggcgggattggatctggatcgcgtggggcgatggatgatatgctttggggcgctgttatggggttcttttggcctgttggttgtgcgatgtggttgcgcagagaggaaggggtgtggagttggaggaagggggtggctgtttgtgtgggtgttattgttaatgctgtttttggggcgatgaggattatgaactgagggtgttgatatgtatatgtatatatcattctttcttcttatttggcgttatgagatacccccaattgaagccatttggtacattctaattgatacgtgagatttgtctaggctattaatcattgtattagagaccgggattgcttggactaaggatttgggtctagctgtgtaaagactcgccgatgctatcatactgtatacataatggcaaatatatgagagacagagacggacagacagacaggcaatagccttgctagtaagagcaggaaataaaaggatatgagagatcagaccgagtatacaaacgccagcgcgaaactcaagtactaatggaacttgctgaaaatgacagcgaaaatcaaaagaaccagaaccgtaataatcgcaatagtgatcatccgattggtagccatcctaaacaacacacaagaggtcagcaatcacgtctatatatagaagaacaagacaaaaggggagtcagtacctacgggccatgcccctcaaagtcttgatactagtatcaacgtaaccctcactctgctgcaagttgttccgagcattcgtgatctgctccctctgctcgtacagtgtgccgagcgtgccgcgagcaacatcctcggtctccagggccatgcgctgactctgctgcagccgtgccgaactgcgctctagccggtccgtaccggacagcaactgctgtctttgttcgaggtgctcatcctgcggctcgtcggtgtatcggtcgccgaatagtgcttgccggtcatccgagagggacttgagcttgcgcttgacctcgtcgatatcggttgagtagttgcggaagcggatgttgacttttgaccgggctgcggaggggatgttctgcttctccatgcgcatttggtcgagctagatggggtttgatcgggttagtttgttctgttcttgtgtttgttcgttgttctcgcattgcggcgcatgaaaaccgggtgaggggttcggtggactcaccagttctgttgcttcttcgaggacttgcgttgcgttgccgattgctgatttccgttgctcgccgcttgcctcggcgatctggtccagcttctggttcagatcggcttgcaccagcttcaactcgttctcgtagctggcgaacatctccgagccggcatctgtgttcaggtttgacatcgtgattgtatagtatgtattctagcttaggtgggagagaagatctgctgtctgcaacggtagttgatgtgttgatgtaggctccacctttatctggggcgggtgacactgttcaacagctgagtggcggtcaacggatcttgttagtgtggcttcgctttgcaaccgatatagactgtttttttgggagttcttagggagcacaaagagaaaatatcgaaataaccaaaggtgctaggataagactggaacgtgacggtgagacacgtgattaatctaagtcgggttgcatttgcgacatgcagatgacatctatataactagtactctatttaaacctacaaccatttatcttttagatgctgcaataaaccggaaacataatttgatacatagcattagagtaacaccaggcccatacaaaacaattcgccttttcaataaacatcaaagatacccctttggtatacaagatcatggaactttctcaagccttctagccatttataacaggaaattcttgctatcttgatcaacaatgattgcgctacgcttggcatccaggaagagatcctcgcactccgcaatatcagcctcctcaattgcgccggggcggccattgacacgcgagagaatgcttgcgggggtcaacagctgcagggcataccgcaagctgaccttgcttccatggtcagcgaccttgttcaaggcaggctctgtgatattgaggccttcaatcttggcgcgcagccggatgatagtcttgatctcctcgggggcgtaggggttggtggggatgataagaaggcgggcaagcagatcaggtgggataccgtgtgcggcactgatttcagtaccgcgaataacggcgtggccacggttggaggcgaggatgacaatcggggagatggtcgattcgagggcgcggttcagatatgtgaagcactcaatgtcgagcatgtgcacctagacgaagaaacgaagtcagagacatgatccaataattgacagcataaactttctccacgtacctcatcgatgaagagaacaccgggaaccaactctgcgacaccctgatcaatgtacctgttgacaaccttgttgatttcctggcgcaacttgtccgtgatttccgtcttcttgggcttcatcagctggcccatcatactcatcacgtcttgtccgccctggggtcgggcgttggccatatccaggtcgtgaagggtcacatcctgaacaatctccttcttcttgtgaacctcacccttggggacaggcacatactcctcagcctcaagatcgaattcggtagcataggcatcggatcgcccgactcgcttgcatgagccggtgttggcttcaatgtagatgacatctccgactgtgacacgctctttctggatggcttcgtagatgctagggtccaggcgcagcttcttggagcccttagcggacttcaatccgatgatcaggtggctaattgtgcgcccgtatccgcccagtgggttctcagcctcctcgggggtaagctctgtcacctctccctcataaacttcctttgtttcgcgaacacggaggcctgtcatgcgttagcttaattttctagcttgtggcgtttttccctgatgtcgtattgcgtaccaatagctctccggaagttctccatcagtgcttcagtcttcttgacctcagcggaatagatttcactgccaacaatagggcagaaaggaaccttagttcctagctcctgcgatacagcaagagcaagagcagtttttccggtaccagggccaccagcaagcagcacagctcgtccagccatcttctttgacttgatcaagtccaccacaacaccgcatgcctgccgatggtttaaaccgttagttatcgttactgcgaaccagataccctggattcagtgttgctatccactcacctcacgggcagctccttgtcccacgaatccatccgcattgagctccggggtcccatcagagcgtaagcctagaccccgaatgtgtgtatgcgctgcggttctgttctcgcgcgagttccccttcacttcactaatctggaccatgtttgggagagatgtggccgagtagagccacgggtattgacgagagatgggtcaatcggttgaaaagaaggaagtagtaataaatcaaagcttcaaagaaatagcctagatcgaaaagaaaggtaacgcgatggttctctgtgagataatgcttctggccgaaattcgcgagcaagggatcggcgaatgagaacgccgccctcaaggcggtgaactgccccaaattcttccctactggacctcttcctccgcctgttgtctactaacgactttccggctttttgtgttctcgacactctgcgagggtccaatagctgtcaaacacaatggcaggcctacacgcaagatccgcaatggccgcccccttctctttggcctcggccttccgcagtctttccatcgccacaccgaagcgatccttctcaacgacgccggcaacgcaatcagttccgaaactaccggaaaccgccccagtctacccctacggagaatccaagtggtacaagcaggctgactccggtctctatggaggcgcttcgatccgattcggcaacaagatctctaagggacgcaatgcaggcaagacacgacgaacctggaagcctaacgtccgccgaaagaagatcgagagcgaggctctgggcgagtcagtgtttatcaaggtcactcgtcgcgccttgcgatcaatatacaaggccaagggcctagacaactatttgctgtctgatcggccaacacgcctcaaggagctcggtcctttcggatggaaccttcgacaccagattatgcaaacaccggcgatcaaggagagatttgataagcagcgtaaggccttcggtattcctgagcccccgacattgagcaaatggatgagggaccacaggctggagatcaggaacaaaatcgaaaacctggacattgacgccatgaccaagcctcgcgtctctccgcgaagcagccagtcgtatgctcgctagaacagcttgagcgaccttgcgtgccgagggaaatgaacaggcgcttgtaccactatcctgaagatcgatggacggttttttgggcaccgcggattttgtgccatctttgtacgctatctcgtttcttgtggtagaaatgatggccacaaatttctaatttgggtgcggtctctttttcaatttgcgtattgggtcttctgtgtattatactccaatctcactgcgtgttcacttatcaagacgtttcattcaactccatctttacgccgagtctataacaacaagtatgtataaacggaatatagcattccggtcaaaatcaaaattccgccgatccaaagaggagtggatacatgagtgtatcgtcgtcagcctccaaagcactgccaatcccgttctcaagggtagaaaaggcctggacatgcatgccagccatcgacctagcatgatttgattcacggaaaaaacggatactcttcggagcgcatgtgactatgcaaaccacccagcattatttggtcatgcgatgccatcatgcgcaagacaccccgatgcatgatgaccgacgtcagcaaaggcatctgagattggatgtgggaagcagactccgccgagatgtgcctccgttccgtagactcgaattcttttggctagaacatcgaaggcatcacgtaaaggttcggcttgaacccatcgctcggcgaggataaccagcgcagttgagcaggcgcgtaatgcttctgggacttctcgtgaccggtaggcaatggttcaatgctaaggtggagttgtcagaagcagtatagaagggtgatacctacggcgacttggctcaagagctaattaccagactaggtcggttgatagggaaaataatcgagggttaccagcacataccccaggtcataattgtgctgtttgtcggtctttttggaaagtccttgccatagcaatctatattgtacaggctgagactggctggtgaggatcgtgaagttataagccatgccaacccatcgatcgctcgtgtagcgttttggggcaacatcgctcaatagccgtaattgagacctctaggagtccagttcacccaacatatgttctcgccatgtcgttgaggagatttatttgaaatttgtaagcgtgcaaagcttggggaagatcgatatgtgtattcgtctagctagttccatagagaaggtaccccaaggccatatgaccgtcgagacgacggtaacatctgccgtgccaggaaggatttgattgattgtcagcaatgattagatttcaaagccaagtatgcaatttcaccattgccaatcgcgttcctggtaccaatccgtgttacgaggtcggaccagtccgtacaagacgtagttaaaatcggaccagttctcgttgctatcgatagagagacccattcaaaagcccgaaatatgcctagagatatagaataagtaaattcacttttagcctattagataccacgcggataaagaatatcacgtgcatctttccggtcgacttatcatagataagcttgctttcgtgaggggaaattggctgaataccgcatgatacaagctctcttatggatatgttagctttataagttcaatgaagatagagaatgaacttactggtagactcgacggaattctttacgcatagcgtcgcggacttcaggcgtctgcctccagatatacagcttagatagcggtacccctggaactttctcccagataatataggtaatgaagcctgagggaataatgtcgtctgattcttactatgcttcttggtagctaagaagcttaaaaataacctcacagcccttctatatgagttccttcagtatatctcactcattcgtagtttgtgttatagtctgctttacttaaatacttgacttcgagatctgggtcccagtaatagggatctgctggtagattcgcacaaatgctggcctctgagctgggttatctttacggtagcaaagaaatttagcggcaacatatagatacctaaagcctttttcgatgtcatgctggtctccgggataagaaatttcattcagcttcgcggtgattacccatgtcacagacggcagcagaaggtttgtttctgtcttagcgtcagtggtgatctcggtgcctacaaggtcacccatcaaatcagtttcagcggtatccatgttggacctgtagatttccttgataggggcataggctaggggtaaaatggttgaggagagaaaagaggagagactcgagaggtatggtcctggatggatgcagggagtaactgtagccttggaggtgtaatctatgagtaatctatttggtaaacggtgacgggtctttccgccgacaggaaaactaaataaaacacatattagaaactattctaatcattcaagccagacattattgagataaccaagttgttgcatcatcttaccgtttactagaatcaaaagcggtatataaagtagggctggcagaactacccgcaagcggtaagagaaatacaagcgcagaagaggaaccagagatgctgagaggggtaataattatttatttcgagtccttttgaccttcgcttttgtaatattttacctcggcaaggaagacaacactataatgcctcagaaaattaccgtggctgtggcacaagcccgcactctgtctactctcgagttgaccctcgcttctctcaaggaaaccacccagcatgcagcttcaaagggcgtccatcttatactcttcccagaagcctacctaggcggatatcctcgcacttgtgactttggaactgctgttggcgcgcgtgctccctacgggcgggatcaatttcttgagtacttccgtgctgccgttgacctgggcgatacgcctgctggagcgggagatgactgggtggagcgtaagctacccgtggcccaaggtcgagaccaccgtggtgatggaacaagagagttcctcgagcggctatcccgcgagacgggcgtctttattgcaactgggttgattgaaaaggccggggggagcttgtactgctctgcgctgtatgtcgatcctttgaggggtgttctggggaaaagacgaaaggtcatgccggtaagtacatgcaaatcaatttttgctgtcatttatagtcaaattggaagatatagactaatgctgacttgaaattgccggaaaaaagactggctcggaacgtctcgtgtgggcgcaggggtctccttctacattaaaagctatcaccacagagctgaatggagtcaagcttactattgccgccgctatctgctgggaaaacttcatgcctttgcttcgtcaaagtctttattcgcaaaatgtgaacatctacctcgcacccacagctgacagccgtgacacctggctgcctctcatgcgcactattggtggcgaaggccgcacttttgtgctttcttgcaaccagtgcgtccgctacagtgaattaccgtcctggatcaccgagcagggtaaaaatacagaaggtacgtggtatatgatcaccctcagtttgcttacttaggtgttcaaatgactcattttctcttagaagatccagaccgctatatctcgcgtggtggctcctgcatcgtcggacccttcggcgaagtcgtggctgaacctatctggcaagtctccactgacgatgcagctgatatctctagcatcgaaaatgcgcttgtgatttctgacatagacttggaggattgtgaacgaggccgacttgacatggatgttgcgggaagctattcaagagatgcattccggttaacggttgacgggttggacctgaaccctcctccgttctaggaatcaagtacaaaagaaatacagttgggcaactctcataagaatgagaaatcttggaacgcctaactatgccaatacttggacagaaaatgtggcgaaatagtgtggcacaaggtgtgtattcagatgtgtatgtacatactagggccgatctataaaatatattattttgcctcgcttcactcagcaaaatcaacaatatttctttcgcaggtcttgtccgatgcaaaaggactgtacatcaaaccaatcaacaaataatctatatgttatctctgatcattttcgatcctaaataggaatttccgctggatgcggttcgctaatggaagttggaatgcggccagcagaggtgggccggattcagacgccaatccctcgggatcttcgtacccgcgtcgatcatcaagttcccttcttcaatactcgatctttgaccttgccatctttcctattatgacttgatttcaacacaaacactgtcccttgtataaactcagggataagcacacgccctcaatgcagttcgcgttacctccacggcggagcccgcatcgtctacctctcccccgttcctctcgaatgtcatcccatcgcaggaaacagttaaaatcggtcgccgtcctcgcaatcgcaatattatcccttctctatctcatccattacctccactccccaacctccatgtccgtggtggcttcggcgggtacttctggagtggtaatcgtcacactgctagaccgtcaacggtgcagcgagagctatctcaaaaagatcattgcaaacagggaggactacgccaagcgtcatggtaataaacccctatacaaagcagtgtggaggagcttcgcaatgaacttgatctaactttcatgcgggaacaggctacaccaacttcttcgcgaaagtctcagattatgacgaagccgttggcgatgctcccatgagctgggccgttgtaccagccatccgtcatgccatggcttcgcatcctcactcggcatatttcttccatctcgcggctaatgctttgatcatgaaccctaccaaatccctcgagtctcatattctagggcagggccatctggaaagcttgatgttgaaggatgtacccattgtgccgccagatagtatcattaagaccttcgtgcaccagaaggaacaggatgtggatcttatcatcacccaggacagcgaagatttaaacccgggaagcttcattttgaagaacggggagtttgcgcgtttcttcctggacgtctggtttgacccgctttaccgcaacttcaactttgctagggcggaagcccatggactggtaagagaaattttttactctattactctatctttatatagatagcgcttcgagagccttgattctgaccgacactttgctaggatcacattttgcagtggcacccaactgttcttgctcgaaccgccttggttcctcagcgcattctaagctcctatagcaaagactcgccgggtgctgctttggacggcacctacaaggatggtgacctcgtgatccaattccatgggtgcggtgatgcagaggcccgagactgtgcccgcgaactagagccgcactacaggctttgggagaagaagaaacagagagattaacgttcttgaagtgacttacattttggggtccacagtttctatgtggggaaatggcgttttgcttgggatctttcttctgttcagggtggtttacctagttataatgttctagggttgatcagcgtttggtcgtggagacctcaacatatggcgtatttttgctttcattggcatgcatagctgcaaaagggacacgataattgttttctatgtccaataccaaataatacatcatctcatgatatcagtaattagtgcataccgtttatcatgacaactagggttgatcgataagctgctcgagacttctttcaagccatcaacaaagacaatctaatgccttgctataattttcttcccttttcccactcaatcactcagcccatggccatagcatatgggatcaccaaataccagcctggacttgaacattcggccaacttcttaagcaaggccggggaagatgacagagcgcttcttcttatacttgtcaccaaactccttgcggtagcgatactccttcttccaagcccagctccacatctgcaacccacccacagcaacgaagatcagcacactccagttcaactggctgacaaggaaaatacccaaccaagccagaatctcaaagaagtagttgggacaggtaacgacactgaagccgaacccagacggaatgcctcgctcagtggtaccgggccggcggagattacgcaggatgtagtgcgcattcagattcgccagctcaccgaagacaaacagggccagtccggcgtacacaagagcctgattgggggtactgctggcggcggtcgcgtccggacggaacacccagtaggcgatgttgaaaccggccagaacccagtagtgggcgctgttcttgacgatgttgcgggcgggcatggtggcactgctgaaacggtgcacaaagattgtctcgaactcgcgcttcaggaagtgcacgctcagcagtgcgcagactaggagctggaggtttgagggcgaggggaggggcttgtcgaaggtgaagtacaggaggggtcggagtgggaagaggaagagcgcggggatcaggagtgggccgaggtactcgatgatgaaaacggtgcgccaggcaatttggggtcctgaagaactatatgttagcttctatgtgcgtggagaagagtgcgctggtcctagggctggattcgcattgtccatgatatgggggaaagacacgcaccgagatccttgacgtagatcacgcttgagtttagcaggccggtgtcctcaatggtgatgttgttcgagttcgggaccacgctgtggtcgctacccttggtgattctcatccggtgaattgagcaaccggatgctgcggagagcgcaacgtgcaattcttcactagaggcatcgagagagatatcgatttccttggggagcttgcggatgggcttgcctgattttagattagcgatgctcttaagctactctctctgtgatcgagcgatttgagaaaaagagctatgtatgcgtaccccttggctgaacaacgagtgtgattttatcagccgccatgatgataacgcagcttaagcagatacaatgcttaaagatggggcttatttgagaccaccaagataacttgaaatcgcgacttggctaaaaaacgtgcttgtcccaacaatctacaagttgggcctcggttgacgtcacgtgttgacacctgaggccacatatccaacgtcgcaatattttgcaatagttgggtgtctttcccagaatggcctcccacggtaggttgccttggcagcttactgaaaacaggggttcgtatggaatactacgatctttgcatcttggcgaactagcctgtggctatgcctgttgctctagatgtcttttgttggagattcgactggcctatccgccaatggcacactgtccaatgcagtattccctcgaggccagcttgaatgtcatcatttactggggcagcaaaggctatatatttcctccgtatctgaagtcacctggcctgtcagccgaaacaagggtatccccggaagctaacgaggccgaatatgcactgtagcggggcatggtggttccagggcagtgctggattttgtgggagctgagaaaaaaacaagctattgtaatatcaaatggcaacgtcaaatcagaatcgaatgatatcgccccatctaccccataggtttcagctccatcttgcacggttactttgaccgaacagcatcgtcagcatcgccaatcattgcccaaccaagaaccaagacagatcatagaagttcattattagagttttttacatgccattcgtattacattgtgattttctctctatgaaaacataactttttgcatagcctgagcgcatcgcagatcttcggacccatttagccgctgctactgccccaatcacagtgtgtagttcgatccacactacgaatcgaaccattgaatgtgctaatatagctcgtgtctatctttatctaggcagtcgtaatccgggtcattcgccataattggctagacaaataccataagacctggtcgacagggtataccccgtatagcatgcgcgaatcagagatattcgattgctcatagcagccagtggggcggtcctcttcacacacaaggtccaccttacgctaagaacgaccacgaatgagggcgctgctggacttcgagaatgtgatgtgcattcagccgtacgctttgctcggatggctctctcggcttactccgtgattaccacgggaggcttattataataatacacacccatttccaccgaaatgatcgcatgatgattcacttcgtcttttcctaattacctttgatagttgtgttgctcttttgcttccatatatacatataccggtaagcgactactattgtctttattgttcgactttcaactatacggcctcggctcaaggtcaacctatgacctcgaagttgacagattaatcacagttcgcactcggatttcttctgtatctgtattataccatctcaattcaccatgtctgaggaagagtccagcagcaagattgctcaggttgagcaagttgtgtctgcagccttgcggcccttgcccactcaaactggcgatggcagctatgtacaagagccaaccgtgacaggccttgctaaggacctactccactttgacctgaaagatgccaaaactttagcggaggttgccaaaactgccgtgactggcgaggctgtgaatgacagagattatatcatggagcgcgtgattcaggtttgtattttcgcgaggaattggctatgttcccactctaactgttctacagcttgctgctggcttgccttcgacatctcggaatggcaaggaactgaccaataccttcctcacccaattgtggggtgatctacagcacccgcctgtctcgtgagtcatgcaatagcgatgttggtctgtgtgggaaatgtccagtgactaactagtgatgcagctatcttggacgcgaggcggcataccggaaagctgatggatctggaaatgtaggaattgttcccttatagatcgagtatctctgctaaacagccctagaacacattttggcctcagattggtgctgctagcaccccatatgcacggtccgttcgacccaagaccatgcagcctgctgctcttccggagccagaggctcttttcgatagtctcttgtcccggaaggatttcaaggaacacccgaacaagatttctagcgtgttgttctatcttgcctctattatcatccacggtatgttatttctgttggttgagatctttgctataagagacacaagaatcaccgaggctaacagttttcagacttgttccagacggatcctcgggaccaaacaaagtcattgacatcctcgtacttggacttgtctccgctttatggcaacaaccagaaagaacaggatacagtcagaacattcaaggatggaaagttgaaacccgactgcttttccactaagcgggttttgggattccctcccggcgtgggcgtacttctcatcatgttcaaccgtttccacaactccgttgtcacgcagttggcagctataaatgaaggtggccgtttcacgaaaccggatgagtcaaattcccaagcttatgccacctgggataacgacctgttccaaactgccagactggttacttgtggtctttatgttaacatcattctgaaagactatgtccgaaccattctcaacgtaaaccgaactgacagtgtgtggagtttggatccccgtgcagagatacgggatggcttgcttggcgaggcacctgctcaggctaccggaaaccaggtatctgccgagttcaatcttgtttatcgctggcattcttgtgtctcagcccgggacgaaaaatggtcagaggatctgtataaagaattatttgatgggcaggatccgaaggagattagcatgcagcaattcacagggggtcttcgccaatgggaatcaaaactcccggcagatccccaagaacgtcctttcggcaaattgcaacgccaaccagatggaacttttgatgataatgatttggtcaagattctccaggagagtattgaggaccctgccggggcttttggtgctttgaatgtgccggatgttttcaggaacattgaggttctcggcatcaagcaggcacgttcttggaatctggctaccttgaacgaattccgtcagtactttggtttggcttcttatcaaacctttgaagagatcaactcagacccattcgtcgcgaaccagcttaagcatttctatgaccaccccgaccttgtcgagctgtaccctggtctcattgtcgaagaggctaaacaggccatgaccccgggtagcggtctatgcactaacttcacgacctccagggccattctatcagatgcggttgctttggttcgtggcgatcgcttctatactgtcgatttcacaccgaaacatctcacaaactgggcattcaatgagatcaacaatgacgtctctgttgatggcggccaggtcttctacaaactgatcctgaaggcctttcccaatcatttccgtggtgactcggtttacgcacacttcccgatggttgtgcctgatgagaacaagaagattctgactagccttggtaaggctaaaatctataactttgaccgaccattttacacggctccgccccgtttcatcaattcccactctgcttgcacaagaatcttgaaagaccaagaaggattcaaggtagtgtggggtgataagatccaattcttgatggagaatagcggccgtccttatggccgagactttgccttagcgggtgatctccctgccaatgaagcttctcgaaagatgcttggtgctgctctgcatcgtgaaaagtgggaatcagaagtaaaggccttctacgaggacattactctgaaactcctcgagcgaaactcattcaaggttgctggcgtcaatcaggtcgacatcgttcgcgatgttgccgttctcgcccaagttcacttctgtgccaatgtcttctccctgtctctcaagacagagtcaaacccaagaggcgtgttcagtgaacaggagttgtatcagatcctggccgttatcttcgcttctattttctacgatgttgacgtgtccaagtctttccaactttgccagactgctcgtaatgttgcacagcagctgggcgaactgacgctagccaacgttgaactcgttgctaagactggattcatttccagtctggtcagccgtctacaccgccatgatattttgagcgattatggcgtccacatgatccaacgcttactcgacagcaaattgcccgttaaggatgttgtgtggtcgcacattcttcccacggccggtgcattggttgccaatcaaggccagcttttctcccaatgcattgactattacctctccgaagaagcggctgagcatctggttgaaatccagcgcttgtctagagaggacactcctgaggctgacgagcttcttgtgcgatagtaagtttcttcatattccattacaatttaagaggccatactaactgtctacagcttcatggaaggagcgagactccgatgctcggtagcattgccacgatttgtcactaagccaacggtggtcgaagataacggcgagaaggtcactttgaaagctggccaggagatcatttgtaacttggtaagttctttgagtcctttgtctcttggtattcagatgttaacagagtacgaaatataggttgttgcaggccgtgatcctgttgcgttccccgatcccgacaaggtccgtctggaccgtgatatgagcctgtacgcccactttggcttcggtcctcatgaatgcctcggtgttaaaatgtgtcctcttgcactttccactatgctcaaggtacttggacgactggataatgtccgtcgcgcccctggactccaaggccatctgaagaggcttgacggactaggaggaatcgccatgtatatggatgccgagcacagtagcttctctccgttcccaatgacaatgaaaattcaatgggacggagacctgcctgccaggaaggagtagatgcatacgtgagagcttcaaaggatgtgaatcttgtttgagagatctctataatatttgcggctggttgtttgtatagcatgcatgcgttttcttagggatgtggttcaccgcatatcaataagtttgtagcaggcttttactctgaactcccacattttttcaaaaatagttgagagattgtggtcaagcatatttcatggtatctctccgtatgtaagataaaatgcaataattccagggttgcatgatatttgtgccgacaaactggaagtaaagacaggcagtcgatgcctgaggcctagcggggggaaatgcagagagccgctccgcccttctgccttttgccggcaagaccagcttctcttcacattgcgtccttctcttctcttctatcaaccttccgccctccttcatcttttccctttgacatatccatcttaatagctccacgtcaaaccttgagggataacgacctgcacccgttttcccttatttgaccgacttgcgatatctcatctctcagctatcgatttgagctttctcacccaagtaccttcacgattggatggtaaattcgatctagcatcgcttcgaattgccttttattgatcgtgaaatattactcaggtccccatcacgttgaatcgattcgattttcgttgaggcagcaaaaaagcatcaaaaacgtcataaggcatcttcgcgctctctccgcgacaccggtctttacgaccttttcaccccaccctctctaggagacaaccctcctggaatctctcaactccctcatgtttgactggtcaatcggtcgttaccatggggagaattaagaaggtcgccagccaaaagcatgaggctacaatcgtaagttactccccgacagcctgatgtgcaacccaactaaaatttttttccttccatcacagtcaccatttttgcaagaattcatagcgcatgccacaagtattcccgttccagagctcccgtcgcttctcaacacattccctaagctatggccgttcccgcgcggtgatctctaccattggatcaatgtcttggaccgattcgacgagattctggcctcagctgtggacaaatacctcctgaatactggccctcagacccaactgtttgcccgaagtgttttggaggaatcatattcggccgatgagagcaagaagccagcagagggtgttgatgctaaactaaatgccctgggatacggccctgaaggagatagagagcttgtggaagcagttcttgatttttctcgccttttgctcgagaaatgtgggaaccgaagcctgtacagcagcagcgatcgcctaggtgacctgttgaacaccacctcactttctctcctacaatctacattgcggctgtctctttgcttagctcaacgataccactctcgccagcgtggcacccatcaacagtccgtattgcagtcccactatgcgcttgatctcgaaaagttgcagaaaatcgcggctcctttcccgcgtccagccatcgccagtaaaacaccgtttggcacgtcttcccccgttttaaccaagggaaaggaaatcacagccaagacgaaagtcaacgccaatgaactggtttccctcgtgcgtgatgacgatggctgggaggaatggggagatgttcgagtcctgtactatccctcaggctctgaacaggccagaactacgtccgaatttggccaaacagagcacggctcacacgttccagctacgccaactccattgcgacgtagcgcacaccccactcctcattccaaccaggcctcgaatggagatgaatcaccagctgttatcggtgggaaggcagaagaggctacacgagcgggtaaagtcctagagcttccctattcaaaagtttcaactgcaaaggtggaagatcttcttgcggcgaacttgcctcatctgccccttgaatcaaaatatgagctgcttcacaagctccgagtcgccaaggcgttgacaacgtcgcgtgctacgcgcgaacagattctttccatcaaggcactggcagtgacaaatctggcccatgttcagccggagagtaccttccaagcaaaggtccttcaatctgatatggaacaaccgaagcgtcttcagcttacttaccagctcgctgaagtggttcatctcggtgccagtggtgacctcgcggtctctcggtctgtccaaactttggcgatccaggcgttggatgctttggccaagcacaaggttcgtgctatcgacgtctgtgcagctttgagcgtcaatgtcaaccacggaattctcatgttcttgacccgtaaaatggtcaatgaactaggccccgaaaacaacgacccggatgatgcttactacgatgagtggcgagatgcgttgcttgcactcctacgcactctcccaagctcgagcacacgtactccggagaccctggttgcagcaggtctgattcccatgtttgttgacatcttgaatctgcggactgaaaaatcccgccgagtctattcccgtatcatggagttccttgacacatttgtgcacgcggtccgtgatgcactgggtacattgacaacagcgaagggttttgacgccatgtctgatttgattgatcacgagaccaagaccgcgtttgagaaggtcaatcgaggggatggatttcctgctaaatacaaaaacccttcggttgactatcaaattccttactttcagcagcagactctgcgctggatgttccgtttcgtcaaccacatcatgcagcacaatggcggaggcttcgatcgtgttctgcgcaacttgatcgattcgcctcagctgttgacttctcttcgccttgtgttcgagaatgctcgtgtgttcggttcacatgtttggagcaacgccgtcaacattctcagcagcttcattcacaacgagcctactagttatgctgtcatcgccgaggctggcctcagcaagagccttcttgctgcggtcatgggtcgtgaacttcacgttctggagaagccgccggccgtggagcctgaagaccgggagactgaggccgacaccgaggccgaaccctccgccactcaaccgcccagcgccgaagccgctattcagtccgagggaaagcaaaaggatcgcgagtatgccatcgtcagaccccagaacacccctctcgcacctggcataatgcccgcggctgatgctcttgcttgtatccctggcgcatttggagctatctgcttgaactcctccggtttggacctcttccagtcctccgatgcactagaaagtttcttcgagatcttcgagaaccccgagcatatcaagtgccttaaggatgacccagaactggttcgttcgttaggcacgacctttgatgagcttgtccgacaccacccagcattgaaaacctctatcatgtctgccgttcttgtaatggctgctcgtatcaacgttctggggcgagtcaaggcatgggagctaggtatgggcacaaaaatgtggacccaagacgccgacggcaaaacaactctttcaggagatgtcttttcattgttccgagagatcggcacagccgttgatgcacccatagacgaccctgcctcgtttggtgctccccagctcaacgccaacactctgcctaacggcgctaagcttgtcgttggggatctagatcacgtcctcccttcgccgggccccaactttgagcctagagataaggatgatcatggtctttcggctacggactacctgttcccagctttgcgattcctgggcgctttcttcgagaaccagacgaactgcacatccttcatcctggccggcggcacagagttcttgttagacattgcaacactccaaagcttggcgtttgatttccacagcaccaacgccaaccaagagattaccgtgcttatccacatgctagcggaaacgaagcctcaccttgtggtcccatctcttgttcgacgcgcacaggcagcagtggacaatctttcagccttttggactgcgcccactggatcgggattcttcacagaattgatcaagccagcagattcaaaaaaacctgctctcgagcctacggctgctgctaaatctggcacattcttcgtgagacatttgaatgctgttcttctccttaccgatgtccttcgcgaggttttcgcatcgccactgtaccaaacccggcctggtcagtctacctctatctttggccaagccaaccttgcggaccactactgttccctagtctcctcattgagcaaccttcttgcttcttgcgtgtgggaaggtattctactggagaagaacatccccgagaagtggctgaaagcgacacaggcctctgctgagaagcatggctctggaaagtcaaaggctgctccggttactgggaacccccaggagccttcagcaacgcctggcgccgaacctcaacgtgagggcactagtgcatcagagactgctccagctcagttgggccagggtccgaaagaagatgacaccgaagttgatgaacagtgtcctgctttcaagaatgcgcgtacgcttcgctaccttctaagcgctctgccaacctcgattacgggattcttgcacaacctcggactcgggattatcggcaagagacgcacagatccgctgcagaaacagaaggcgaatgcatttttggtctcagacgccattgctgaaggtgttcttcgccaactgcagttcgacccggccaattccagcaacagccccaagcatcgtttcgcatatctcattgtcatcctttcacacttctcgcaccttctttatgaagtctcctcagatcgtcccagtccgaactacttgacttcagttctcgtctcgttcaataaaaacaacggcctcaaagtattgaaagacatctgtgacgtcttcttgagtgatatcaagtcccttccatctgcggagtctattcccgaccaagacaaggagcttgctgaccggcttgcatccggatatggtggaattaaaatcattcttggattattcgcagacctcactgctgggaaattcatcgtggactctagccagacacaagccttgacttctcaccctgaccgggaccgcgaccgtcccgactacttccagccaggtcaactcttggtggatcttcgcatggagatcttgcccatggccagagacatgtggaactcggactttgcgacccagtcatcgagtccaattgtccgattgttgattgatatcatgcggttctccttggatggtgaatacgaggctggcgcggctcgtaaagcagataccccgcccgtcttggtagaggtgcccaagaaaccattcgtggtccacacggaacgagcaactgccttgcttgagaaagggtacacggatgttgatctcaataaagaagccctttatcgttgcaacaatcttttaacggcggctgaagaatactgcaaggcccagcagtggctacgagcccctcccagagtacccccgagtcccggcgatatcaaaaccggactacccgagtctgcttctggcatcgacctcctcgatgaccctggtcttggagaggttccacctttcaatgctgccaattcgttagaccgctctggagccctccagttgattctagctcaggcgcaacgtcctcctttccccggaggcgatattgactccgacatgcaccgcaatttggccgaagctctagacaatgttctcaacgacaatgatgacatggatagcgatgaccgaggcgagtcatcgaaccagcgtcggcccgagagtcgtaatatcggggcaagctcttccgaatctaccgcgccccctcagggagaaccggtgaaacgtcgccatatggtcacaatcgaagatctggatgcagagaggcaaaacattcggtcaaacctgatcgatcgggctctggatattctaaatgaacatcatgatgtctctttcgagctgtctgacttgatcacctcggctatcaagaagcacaacgagcctgtcaacttccgtcgagacattggagagaccctcgttcaatcgctagtctctctacaaatggagaacttccagacagctggcaaaaagattgcagcttatgcccacattctcgcactgacccttcaagatcctgacatgtacctcgccactcttgaagagctcaaagattgcttctcgactttccttggatttatcaagctcccaacacccgaaaaggccgaccaagaaaccttcccttgggttggacacgtccttctcattctcgagaagcttctgtctgatgattgccagcctccccagattgcctggaaactgccaagtcttgatgatcccaaccccagcggcgatgaaccagcccgtcttgaagatccacttgtctccctcgatgagaagacccagctatttgaagctcttgtcgagatcctaccccgagtgggcaaggatgatacactcgcgctctccatgtgccgtgttcttgtcattctcacccgcgagcgcagcattgccgctcgctttggtgagaagcgaaaccttcagcgtttgttcgtgatggttaaacaactttctagcgctacaaacgataaactccaaagtgccttcatgctgattcttcgtcacatcgtcgaagacgaagctactatccggcagatcatgaggagcgaaattgtggccaactttgagtccaagactacccgtcagatggacacgaacggctatgtacgacatatgtatcacctcgtgctgagagctcctgatatctttgtggaggttacaaatgaaaagctacggttgctccgatatgacaaccatcaacgtccacaggttcttggattgaaggccgacaaggatcggcagcaaaagcgaggaagagccagtgtctttattgaagagccgaagccagaatcatcttcagcgggtgaagcatctgcccctgaaggcacggacaagggcaaggcccaaaccaagggtgccgaactcaaggccccaattgtggagaacccggatggtgttattcattacctgctttcggagcttctgtcctacaaggatgtggacgacaaagaaaccagtcttgaattctcggagcaggcagctgaccaatccgatactcaaactgatgttgagatggctgtggacgagccaacaccttcgatttcgagcactgccgcagcacaaacatctcgcggttccaagaaggcagaaaagccccaattcaaggcagatgaccatccgatttacatctaccgctgcttgctccttcagtgcttgacggaacttctttcctcttacaaccggactaaagtcgagttcatcaacttttcccgcaaggctgatcctctagccactacaccctccaaaccgcgctctggcgtcctcaactatttgctgaacgtgcttgttccccttggtaccatggatcatgatgagtctttggtgttcaaaaagcgcagtatcacctccacatggaccatgcaagtgcttgttgcgctttgcaccaagaccggtgaatttggtggtgttggtaaacgtcgtaccgaccctaagtatgaggaggatgagcctgagcttgcttttgtccgccgctttgtgctagagcatgctctccggtcctacaaggatgctatggcctctactgaacccctagatgtcaagtattccaagctcatgtctcttgctgacctcttcgataaaatgctcagcggctactccttcaccaacgatgcgggcttcccaacttcaaccaggcagctcgcgaagaccatgttcgaaaagaattttatccccgcgctcacttcttccgtcgccgatgtcgacttgaatttcccgtcctctagacgtgtcattaagtatattcttcgtccgttgaataaacttacccagactgccgtacttctcagcgagacctcggacatcactatccaaggtgataacgaggatgatgagatctcatcggcaacttccgtttctgacatggaagatgaacgcgaagaaacacctgacctcttccgccactccactctcggcatgctagagcctcgtcatgacgaggaagagagcagcaccgaagaatcggagggtgaggacgatgagatgtacgatgatgaatatgacgaagaaatggactacgacgaggatgtcgctgaagatgatggtgaagtcgttagcgacgaagacgacgatggcatgggtccaattgaaggtctttccggagatgcagtcgaagtcatccttgacgaagatgatgacgaggacgaggacgaagatgatgaagaccacgaccattcggacatgcatgatgacatgtatgatggagaaatcggtggtgacagagacaacgaaagcctcgaagatggcgcagaggacgaatgggaaagtgaagaaatgaccgaagacgaagaagaggtcgagatgatgaaccagtttgaagatgaaatggccgacatcagacaatccactagacaccaaggtgaagatcaacatcttggtgacctattccgtgccctcaatggttccggtgttgatgatatccatggagatgctctaggtggtgatattcacgaagaaatcgatgacctcgatgaagatggtttgtccctccttagactgctgaggcaacaaatgccggcgcaaccaccagccttgctgacatccggtccagttgaagacgaagacgaaatggatgaacttgacgaggacatggatgatttcgatgaggaccaaggatcttatgaggatatggaaggtgagtccaactctctcgatgattttctcacagcattgctgactctcccagaagacgatgatcttcttgagccgtggggatgggaaggcgatgaacctccaatggcccgaggacatgcgcaatcccgcttccgcgcagccccaccaccggcctgggctaccgtcactgaaatcatgccgggtcgcccatccggtctcgttcccattcagccttaccaccgtgtccaccgaacccaaatcccgactcacggcaacgacgatggcactaatcctcttctcgtccggactgaccgcccagatcctactgttccacctcgggttgctgctgatgctttcgccgattggggccagtctatggaccctgcaggtggccgggttgttgccatggatagccccatcagcttcatgaatgccattatgcaagccattggcgggcaggcagcgccaggtttcggcgttgtcactcgccctgatggtattcacgtccatgtcgaccgacgggcggtcttgcctggtcgtatccaggatatgctcgggattccccgaggagcaggccctccaactcgcactcgcggcgacgaccctcacactgccgtcaagtttggtcttggtaccaccagaaaccgctggcaagaagaggcccacattatcttcaacagccagtatattgagcggacccagcgcgtcgtcaactccattctgaggctcttggttccccctgccatcgaggaggagaagcagcgccagaagctcgcggaagaggaacgcaagcgtgttcaagccgaaagggctgaaaaggaccgccaagatcgcattgccgctgaagaaaaacagcgcgagcttaagcaaaaggaggaggaggagaacgcccggctacaggcagagaaagaacaacaggaagccgagcgccaagctgcaggggttgatgagcccatggaagacgtccaagaaaccgatacggttgaagacgctggcccatctactcaacccgaagcccaacccgctgaacccgctcgtcgagtctacacgaacatcaggggccgccaagttgatatcaccggtctcgagatcgattcagaatatctagaggctcttcctgaggaacttcgggaggaggtcatcatgcaacagcttgctgaacatcggtcccaggctgctgctgcgggtgaggaggatactgagataaaccaagaattccttgaggccttgcctgccgaaatccgcgaagaattgctgcaacaagaagcggccgatcgacgccgacgggaacgtgagaccgcacgacgacaggcggccgctgctggtggtgctggtgctacttctagcactcaaccggcggaagaaatggatgctgttagcttccttgccactctcgatccctctttgcgccaggctgttctggccgatcagcccgaggatgttctcgcaaccttgggcccggattacttgaatgaagctcgtggtatgggcggtagcggccgacgcatggcccagtttggtgacatgagtgccattgatcaccgccagcctgctgcaggccaagagtcgaagaaagagcagagacgtcaaactgttcaaatgctcgacaaggctggcgttgcaacccttctccgtctaatgtttatgcctcttcagggcaacgctcgccatcaattgaatgatattcttcacaatgtttgcgagaaccgccagaaccggagtgaagtgctcagcgttcttctttcgatcttgcaggatggcagcgtcgattccactgcgatcgaacgcagcttttctcatctttctctgcgtgcaaaggcaccaggagcacaaaagacgcctcagtctaagcgatccctcgctatccagactgcctcgagcgtcagcagcgaagtgaccccgattatggtcatccaacaatgtatcgccgcgctgtctttcctttcgcagttcaacccacacattgcttggttcttcctaacggaacatgactctgcctcagctggtaaactcaagtcattgcgtaagggcaaaggcaaagataaccgagctaacaagttcgctctgaatgccctgctttctcttcttgaccgcaagttgataatggaaagccctaattgcatggagcaggtgtctagcctcctgagcagtatcacacagccattgactgttctccttcgtcgtgagaaggagcgacaggaagaggacaagggcaagaagcctgagcgacctcaaatcgaagcatctgccgaacttgctgaggctgccgactccagtatggacacatccatgacggatgctccgcttcccactgtggaaacttccgaagtccctagtgaagagaccgcagagggtgaagaggctacttcagctgaagccaagaaacctgaagattccaaggagcccaccggggacgggaagcgcaagaagcgaaccatcgagcctcctgtcgttccggatcacaacttccgattagttgtccacatccttgcggctcgtgagtgcaatggcaagatattccgcgatacactttccaccatcaacaatctttccgctattcccggagctagagatgtgatcggcaatgaattggttgctcaagcgcaggccctcagcgataccatcctgggtgatttggaggatcttctccctcatatccgccaggccaagactggtaccgacatgcaaggccttgctctggccaagttctccccggctagctcagaccaggcgaaattgttacgtatcctgaccgcacttgattatctgtttgaccaagcacgagcggacaagtccaaggatatcgagcctagatccgctccgaaggaagatgtgctcaagaaactctatgaaagcgccactttcggcccgctttggagcaaactgagcgactgcttgactgtcattcggcagaaagagaatatgctgaacgtggctactattctcctccctctcattgaggcattgatggtcgtttgcaagaacaccacgctgaaggaccagccgctatctcgcggcagccgcgaattgtcagtcaacagcaccccagccgatgctggtctcagcatggaaaacatattcttcaagttcacagaagaacatcgcaagattctcaatgagctcgtccgccagaacccccgcctgatgagcggcacattctctctattggtcaagaaccccaaggtcttggaattcgataacaagcgcaactacttcactcgtcgtgtccactcccgcggtgccgagcctcgccaccctcatcctcctcttcagctctctgtgcgcagagctgaggttttccttgactctttcaagtcattgtacttcaagagcgcggatgagttgaagtatggcaaattgaatgtacgattccatggcgaggagggtgtcgatgctggtggtgtcaccagagaatggttccaggttcttgcgcgtggcatgttcaaccccaactacgctttgttcatccctgtcgccgctgatcggaccacattccaccccaatcgcctcagtggggtcaactcggagcatctgatgttcttcaagttcatcgggcgcatcatcggtaaggccttgtacgaaggtcgtgttctcgactgtcacttcagtagagcagtctacaagaatatcctcggacgatccgtgtctatcaaggatatggaaacgctcgacttggactactacaaatcacttctgtggatgctggagaacgacattaccgatatcatcaccgaaaccttttccattgaaaccgatgactttggcgagaagcaggtcatcgacctgaagcccggtggtcacgacattcccgttacacaggagaacaaggaagagtacgttcagcgcgtggtcgaatatcgcctcgtcgagtcggttcgtgaacaactggacaacttcctcaagggtttccacgaaatcattcctcccgagttgatctccattttcaacgagcaagagctggaacttttgatttctggtcttcctgagattgatgtggacgagtggaagaacaacaccgagtatcacaactactccgcgtcctcttcgcaaatccagtggttctggcgtgccgtccgctcgttcgacaaggaggagcgtgccaagctgttgcagttcgtcactggaaccagtaaggttcctctcaatggcttcaaggaacttgagggtatgaacggtgtgagcaagttcaacatccatcgcgactatggccataaggatcgccttcccagctcgcatacctgcttcaaccgtaagtttttctccgcatttcttgattacattagcgcattttactaactatcttaacagagcttgatcttcctgagtatgaaagttacgaagatctccgtcaacgcctttacacggccgtcacggctggaagtgagtacttcggatttgcctagactgctgtcctgttctacggtatgggaatggttttatcaagccaaagcattgcacggcgtttctctcggttcttacgagattttctttttatggggacgaatgcggaaagtggccagcgagaagtttctttatgagaagatgaaaactgaggcaagtggtaaggaattcggttgaagtgcaggtcaaccgtgttttttccagcgccctctctatgtacttagattgctgcatctatttcttttacttcaaatcggccgcgcactaatccgtactttactggccattgtgagtagaacttcagggcttccagggcttgctgatgtcatcaggcggtcagcccgtcacgggactacgtagaaaaaaagacatgcggggccgcggaggaaaaacgattttttgagccgaacacggtcatcttggagaagagtgtgttttgtgcatcttggattgaatatctcttctttaactgtttcacagagccctacatcatgtcgaccaactccattaagctcttgactggcaacagtcacccggagcttgccaacctagttgctgaccggtatgtgcaaccggctagggcaaaactgggcaaccggctaattctagaactatgaattaggctcggcattgagttgaccaagattatggtcctgcaatattccaaccaggaaaccagtgtcacaatcggagagagtgtccgggacgaagatggtaagaacatcccaccttaatcgtgatatcaagaacccccgctcatatatatatgatttgttacagtcttcatcctccaatcgacaaaacccaatgatatcaacgatggacttatggagctcctgatcatgatcaacgcctgcaagaccgcctcggcccgccgtatcacagccgtcattcccaacttcccttatgcccgccaagataagaaggacaagagccgtgctcccatcaccgccaagctgatggccaacatgctccagaccgccggctgcaaccacgtcatcaccatggacctgcacgccagccagatccagggcttcttcaacgtccccgtcgacaacctgtacgccgagcctagcatgctcaagtatatccgcgagaacctcgatgtcagcaactgtgtcatcgtcagcccggatgctggcggtgccaagcggtaagccatgtctatctcgatactacacgtatatgtatagttcaagggctaatgtggatttagtgctactgccattgccgatcgcctggatctgcaattcgcacttattcacaaggaacgtgcccgccccaatgaggtctcgcgcatggtccttgtcggtaacgtcaaggataaggtcgctatcatcgtcgatgatatggccgacacctgcgggacgctcgtcaaggctgccgaaaccgtcatgcagcacggtgccaccgaagtcaacgccatcgttgtccacggtattctgtccggcaaggctattgagaacctgaacggtagctgcctcaagcggtatgtatacgtccgaatgccatcgacgagtcattgcactcttggatggtttccgatttttcggttcacttttggctaactctctactcgcagcattatcgtcagcaacactgtcccattgggcgacaagcaggagcagtgcgacaagatccatacgatcgatatcagcccgacattggcagaggcttgccgtcgtacacacaacggcgagtcagttagcttcttgttctcgcacaccgtggggtaaatcagaggcagaaatgaatttatacatcaagacagaggatcaaatctacgggttgtcctagtgattacctacgaatgttggcgtgaaacccgcggagtgagcgggaaacaaaaaaatacgattttcatgacctttattagccggacgaggatgttagtccccgggtgttttattattgtttactatacttttcttttgaagagagatcgacggttaagtgttggatctgcgcagttctctctggcggaagttggttatccttggctgggtttggttgcatcgtgcatgtatgtggtcttgatatgcagagtacatgtactttctatttggtttagattattgcaaggtctgggggccgctttacaacttgaattagatcgtcttttcttactaaggaggtgctgctatgactatgttgactgcatcggtgtagtcttaatatgttgttgatccaacgatatatataggtttataacaggggttcattactggtcgtggaggtgaagccggaacttttcccatccctatcttctccaaatacgtaccattgaccgcaaagtgcagtcatatcttgaaaaatataattccaaacgcctttcgatatcatagacttataccacgtgacctatacctaaacatgactttgggggaattgtaactggcagtggggaatttaaggtaatgacttgattgaactggtgttttaagtcacttcattgacacttcattcaagtggagtagaagagtccacagagaggaatacaatatgctacgcctactccttgaaaaagccatgagcaattgacagaactgagtattgaaatttgcatgcactccattcaaaaaaaaagggtcatcaaaaaaaggtaggttcaacacagatatgcattgcgactcccaaggcccgaaatcaccgtagccaaacacaagggagtatcaaccactcagcctgctttgtacgttttgagacctgttccccgtcacttttcttgttcccatttcttttttatcagacatgtatcctccgcgcccctgagagtgattcattttttatgaattcccctcaaatcatcccagagacgtgaagctcctccattaaaccccatcgccgcagaacgaaatcataaaaccgcgggtttggaagtttacttccgcatggaagaagctctccgcttgcggagctcatcacgcttggccttctcctcgtggacacggccggcaaggagcttagcgtagtcgttactatgtaaccgttagttcgagttccaaatcacatcaacactcataaatcattgatcagagcgaaatagagggagtcttacgcagcatcacgggcagtctcagcacggcggcgcttgatggcaacgcgttggcgcttgcgctggagacgctggggggtaaccagacgctggatcttgggggccttggtgtaatccttcttgccctccttggtgacggtacggcggatgacgaacttgcggacgtcgtccttcttgtcgagaccgaagaagcgacggatcttggtggcacgcttggggccgagacgcttggggacaacggtgtcggtgaggccggggagctcgccctcgccctgcttgacgatggagagagcaaggacggcaaggtccagaccggtgatggcgccacggacggacttgcgcttgcgctcaccggtgcggcggggacggtagcagctgtggccgtcggcaaggagcagacgggtacgggtggggaggagaactgtagaaatcattcgatgagcatcctgcggtttgttgatatccctgggggttggatataatttttttgatcattccccaggttgttgtgcggctgtgtacgtaccaccctgcttcatggggaaacctgtaaattaatcgtcagcattgtggttctcgttatgtgcgttggattgtattctccattatcgaaatgttgctccgacattgggaatagagattgtatgcgtaccctgcttgtcgttaccaccggtaatcttgaacacgtaaccgttgaactcgtcaccgagagcatcgccggcaacctaatcaaaagagataccagttagccagttgttctaatagtcgtgtgtgtgcgtatgttgttcatcgattgaatgtcggataggcggggaaggatgaagaagggagtgctgacttcggtgcccatgcgcttctccatgaagggacggagcttgcgctcatcatcgatctcgataattttctgggacccattggccgggtaggagatgttgagcttcatcttgacggaggcggcgcggtcaagacggtagcgcgggtgttgtcgatttgtgagattgtcgtcgagggagtctgtattgtggatttttttagttcgccggcttagcgaggtgcaagtcacgtgtcacgtgtgggaagtagggcttacgtcggccagatggggtttagcgtggcttggtaagtcatgtgactctgcatcagcaccccgacattttcttttcttcgtccgactcaacaaatctacggcgctggcccctaaaataattgatactttcagcgataaatataagactcaatccgacaactatgcatccaggcaacaacacatatcgaggaccgccagcaactacagtttacctccgccttgaaccgacacagtctcctttacctttaccctggcatgaaacctcccagtgtgactttcgaacacaactgactttgaatcaccatcggaatgatgaacgaaatgttcggatcatgactcagtctcgactggccgaactcaacttttatacatatcaaagactgagcacggtctcacaaacgcctcattgacagccaccacgagcctcgtacgacaattgcaaataacagcctccactaactatatttgaggacctttgatgtgaacccgcatgtcagacactgcaaacgccagtgcataacctctggatttgtaagacactatctcatggatagatggattagtcctgggattcagaaatccgatccattgggctcaaatccatattagggacgtttgaaggtgatattcaagatagccccacgacgtgtttttggatatgttttagatgtctctccccttcatagtgtcatagtcagataaaaaataattagtaggtcagtcctcgtacctttcctccatactttattctcttccatgcatcatttcccaataaaaacgttgtgtcacaaactccgctctagagatctgcagtatataatgtcttggcatgtctcataccgagaaacaattgcatgtccgacgggcaaagagttcaaaggaacgccaaatctcttgagacaatgcgaaacagaacctggacgtggccttgtgccgggctttgtatgcgatgcgagtactccgtaagtctagacctgatctccactattcggaactgaagaattgcgaaagggacaggagaacccaaatatcaccgagaagcttgctgaatccgtatacggaagaaaataccagatcaagcaattgtggctctaaatcggcgactctgatttgtccagtcggacgttagtcgactcggctctccgagccacgcggccaacctacaagtgtgacgaattcgcgcctcacgtagggattctggttttttttgggaattaggtcttctgcttgctagtcctagcttataatatagacacttccgtcctgtttctatcttctttccattttcccctagcgtttctggaggaaccgccacatacccgactttgccggtgctccttgtccgagtgggggatttcgtcgcaatctccaatttttttgcagtgccggataatctcctggttccccgcacaatcggtgagacattcgttcctgattatcttgtctcacattgcttctgggggattgctatatactttgggagcatttgtggcgacttcatctccgaaacaagcggacgacgtgaggtccaagctcgacattgctcgacattgctcaaggggcatattctggctgtggccgttcagtcgccatgacgcgcctttttaaccgtttctacgcgctggctgctgtcgcagtctgcatgattttcacatcggcgtggtttttgacgtcacgggggttctccgatatcgtccccttggtctcagaaccgttccaagtagccagcacattcgacaagcgattagtggtgttcggcgactcctggagcgacaacaaatccgacgaggcgcagggcaggatttggacggaccggctttgttcaatggtaagataaccacccgagagattaaaggagaaacaagcgtgtctgacagaacctgaaacacgattagttctcctgccaccaagagaacctagcacaaacagccaatccaggcaagaacatcggcgcggtggtcgacaactcagaactcgaccatctagaccgactgtctcagacccacatcgccgacttcaagtcgcagctccggcaatggctagacgccgagtccgccgcgacgaaggatcttcccgaggaagaggtgcggtcccggcaggaccgcacgatcttcgtcgtctcgttcggagtgtgggatctctggagcctggttacaaaggactacgacgtagcaagcaaatcggttgagcggcgcattgcaacgcttatgagccagctcgacacgctgtccgatcgctggggcaccacggatctgaaggttattctgacgcagacggtcgacgtgactttcctgcccgggtttaactcggtgggggatcagtacaaggatacggtgcggatcctggacgagtggaatgggaagctgcgggaggtggctcgggagtggagtcagggcactatctatctgtttgatactaatgcttttatgatggaccgcatccgtgactggcagctctatgcggcaggcattgaggaagagaatggtctaggcaaaaacctggttcctgggtgggagaatgtcgtggagccttgtgttgagagtggggtccaggtcatgatgtcaaaggagaagaaacagtgtgaagatccagagaggtatctgttctggtgagtggttttcttttcgtcattccctatcagttgtgtatgaaatgtggttggggaagggatcgacatgtccaatgcctttttttgctgactgtgacattgatgatttcaggaacgacatgcatttgggtccttcagcacaccggctcatggcggcggagatttaccatgggattgatgggattatgttgaacccgaatgggaccgagaagcgccacaaccgggggtttgcagcttagacattgtccagatgaataaagattcaaacatccaagacattcaaaaccttcaaaatgagacaaacaactcaaaaatgagaaaagaaagaaaaggaaaaagaaaagatcggtgacgtctggccgggggggttgtatagccatgatgtcggtacccgcgaagtcaaacgcagaaactatacttgatgcgggtgagccatggccaggttcctggacaatcaaagtgtgtgcggtggatctgaacccttggacatccaaagggcacggtagtaccgatggtcaaactggaacctggaacctgcagatggggttattggaacacgggaagatccagaccgatatccattacccgagacaagagggaaataggggggaaagggtggtattgttcgaagcccacaagtgacagtgactgtaacgtgcagtggatcgcgagatcggcaatgagatcatcccagatcccggcagtctgatggtaatttgcaattacgggagatttgaagaataactgttttatgaattgaacagctgacaaggacaatcaagctcgaagtctaaaaaggcgaaattaattgtttcactgatttccagaaataagaaagaaataagaaacaaataagaaataacccaatttgttctctttgtctgatttgccggggaactgatttaggacataccccgaccaatcatgggccggataataagttgggtggaccatagtggaccctcgtgggccagctcgatcaagcgggtcgccgcatccggagacaaagaaaacaatgactctagtggtcttggccagggaaagagagggaaataggggatttcttggggagttgggagttgacacatcgattttggtctctttcggtttcttttggtttttttcttttttcttttcttttcttttcttttctttttctcttcttttcgtttcggtctctggttgggcctaatcggaaggtaccgtgtcgttgggagtatagaaatcgagatcccccaagtctccctatagcgaatataacaaagaaaagccgcgattaatcctcttttcgtacttttattttaatttctttttctctcggttggctcggtcagaatcccaaggcccaggagctattgtcaaagaaccaggcgctagacagggattccgggggggaacacccaacaagacaaagaaaaaccgcttttagggcttttgtgtccaaacgcccatatacttcgctttgtgctgatccctgatattccccggtctttcacgcattgcttattgggattatttcccatttttcctcccgaacggattcattttctttgttgccgtcggtccccatctctttcctttcttgttatttcttggggcccaatcgcccccaaacctattcccttctgccttctctttcaaagccgtatatacactttttttcctcctacctttcccttgtgaccaatctttctttgatcctcatcttcgccttcgagccagttcattcagagaaaagtattaaataaatgtcttacgatcgagttctccccaaccctgttgctctacgttatgagtctgcccaagtctcactgcctagaccgagcaatttactcgatcacaaagttatgaacgaagaattgcccaagtcggtcatggccatgagacaccccgacggcgcagtcagatacgccgatccgaggtcaacggggatacatcagacacatcaacatatctccaaagaagcacaccggatgtcctccaatggccccggcaagcctgtcggacccatgatctccaccaaggaattgccattgcgagagagatcggatcgatcctcctcctcgtcagctagcagtaccagtcctatcaaatcacacaaagagagtgccctgcagttctgcctctgccagccagatccgaagattccccggcctcgtaatggtgagtcgatactgtccgcaccgtcattacagtttggcaagtgctttttcgattgtttcttttttggtcgtcgtcagccagatcggatctttcgaacgcatggacatggctaatattggtctagcgtttattctgtatcgccagcattatcaggccatggttgttgctcataacccgggcttggccaatcctgagatctccaagattattggagaacagtggcgttctctttcggaggaggacaagagtaaatggaaggcacttgcagaggtatgaaagcaatcccagagatatggattcaaacactgacattacaccaggaggaaaaagctcgccatcagcagcaataccctgactaccgctaccagcctcggcggtatggtcgggatggaagcgcccgaagctcggccacaggaattgggcacaacccatctggctcatcacattgtaacagatgtggtggccgattgatgaatgcacccgcttcccccatgaccccgttcacacccagcagtgggcctgggtttcgaccatcaaacttctcaccacacccaagtagcatgccgccaagaagcgtccaaggccatgagaaagaccctaatccaccaaagtcggccaagatggaccacgatccccgttctcgccaacgacactgggaggaacccggtggtcgatctcccgacaacaaacgccgccgggtatcccaggcctcattcaagccaactttacatccctaccgggaccacagtcctggcaacggcgttccagagtcaccgcatccgatgaccccttggagtgctcgcccggagatgccgccacgccatctccccatgcttcaaccgcaacggccatatcaaagcgtccagggacagtcacaccccgaccccagtctgaagctaccgccactccagaccacaacaccggtgatgactcccatgacaccctatccacaggaaggctccagtgtcgaagcaacagtcatgacaatccccttcctcaacaagatcaaagtcctcgccaaaatctccccacccctcctcccctcattccgagacggaatcccaccagcccgcggccccgtcatcgccgtcgacggccaagacccggacctcgtccaagcagccgtcgaatacctcaacaaccttctaaaaaaggaaacaaagtaccacgtccgggtattcgacggtccagaaatcaaagccccccgaccaacctccgcagaagccggccagatgggcgacgcgacagtcgactacctcaacaccatctccgcctggcaccggatctccgacgaagtcgtcaacttcgtgaaacccacctcgcgagccggctccgtcgacgcccgctccataaccacagacgaggaaacccccgtccccaacgtctccccccgcaccctcatccccaaaaccgcaaacatgcacatccactccccagtcctgtccagcgagaacggctccgaggtcagcgccctcacatcagccagccactacagcgtaccgattgcgctcgtcccgcgctaccagctcacgacggcggatgcattcgcctgctccacgcccatcggcgactcctacgcgccgctcgaccactggcagtggatggcgtcgctgtggcgcgcgtgtgtgggccctgatatcacggtttacattcgggagtgcagcaaggaggagcttgatcgcatgggtgggaatccggttgaggtgcgattgcaggatgtgcgcacggtggtgctacggaaggttgctgggagggatttggaggagaaggcgttgaagcggatgggttttgagattgaggattttttgacgcagtaagcttagcctgcttgggctgggctatagaatgtgatttggtgcattaggattgggttcattggttggggcatgtgatagatgggatcgtggtaatttgatgatggctcatcatgtttctaatacaatattactagtgaacagtgaacagtgaactgtataatgaggttaaaataacaatcgacgtgacatgtaaggtcctaagaagccagcgctcgggccctcttggtccaccgaaagttggagtctctgggtcccgaggcggagccgcttatccaaggcggtcaccattatgtatgcctatctccgcattttattttatccatgcatgttgtcttcctacaactattcaccatgtcggacctgtcccaactgggcccagagcgctggaacaggtcgccaatactaataagctctgaaccttctggtcttccttttatcccccctgccagtcctcctcccgatgtgaaattcgagatcgcagagatagatgagccgctcaacccattcgtcccagagccagatgagccccttgacccagaggtggatcggtcatctctaaatcgaggggaacatcttccacctctgggtagagagggctatctgcctctagatcccgaggttcatttgtcgcctctcgacccccgcaccccaaaggcaaatacgcatttcgataactatatcccagccggcgttttgggcaaaacccgctccacgtcccgctacccagactgcgagattagactgctggaaacacatgaatggatccgcacacgctttcttgtcgacagcagaaatgtacagattttcgtgctaccaagggcagagaaagtccgggatcaatctggaaagactctcaaattcaaggctctcagatacgctctcaaaaccgtcatgtccatggtcgatagctcctctgaagcatggaacggcttggttgatgcccgttttgatctacttgccaacagtcaacctgacagcgaagaagaatcactatattacatatacaatacgctgcaagaacccaaaccagacttggaccaagtaacagatccgatctcgtggcgtgttatggatgaattacttaccaattcggttcgaaatcttaaaacatcacttcatccgtttcagcgcgagtctgctgctttcatgattcagcgggaggtacagccggccctggcgcttgatccgagattccagcctttacggggtccgaccgggttggagttttattataataaggagtctgggagcattttgcgtgataagatattgtatcccgaggcctgtggaggtaatttttgccactaatctctcaatgatggtggtcaaatatcttgtgaactatactgactagtactagggatattggcagagtccatgggatgcgggaaaacactcatcagtcttgctgtgatattggctacacggggacatttccccaaaatcccggtggagtatcaaaaactcgagaaccccgtcaggcaaaagactggaacattattgcaaatgactgctgctgctgctgggcgcttttctctgccctggaaggagtacattgaccagaagagagcctgtgggcaatatctcattaattgtgagaaggcctgcgagacctaccgtggttcctatattatccccgcaaaagagaacgcaagatctagatcaatgtacgtccaattgcccgaggaaattcgtctctcctctggtacagtcgttattgtcccggacaacttggtggaccactgggaacgcgagatcgctactcacactagcaatctgaatgtcctggtactgcgaaatagtacccctgaaacaccgtcagcggacgaacttctagaatttgatattgtgttgttaactaaagcccgatgcgttagagagaatccaagccgtggaaagaggccagattctcctcttttcaatcttcactggttgcgagttattgtcgatgaagggcatgacctttccagtcgagtgacgaatttgtcccacttgctaggcaaactgaaattcgagcgccgctggatgatttcgggaacccctctttcggaattgtatggagtggaactgagcattgcatcgcgggaagtgaacatagacgatcctgtatcgtcggacgaagacgcatccttgcagtttcacaaaaagacgggcaatgccgtcgatactgaaatcaaaaatgtgagtaaattgggtgatatggttcattatttcttcaacctcaagccttgggccaacaatcccgaagattggctacgttatacaagagcggtgggtgaagatggcattcgtcgaaaatctccttctctacgtgcgatccttcagggtcttgttgtgcgacaccggtacgaaaccgtcaaaaaagagatcactcttccaccgctgtacaacaaggtcatctacctggagccgaccttctacgaccggctctatatcaacatgttcctcttcacactcgcagtcaacgccattacatctgaacgtgaaggtcccgactatatgttcaatgggaagaagacagggaaaaagaatagactgatggagttgatacaaaacttacgtcttgctggattttggtgggctggtgatgacaatgtccaaagtactgttgacattgctctggaatatctgcagaacaacgaagagaagatgacagcggcagatgtcaaccaattaaaacaaggtatcgagatcgcacgaaaggcaattaactccactggctggaatgggttcaaaaatatgcatgagcttggcgtctttgttcgaaatttcccagagaatgctcgcaacatgtgggctcttgatcctacagacgccgaccgcgagcccctgctcatgggtatgacgcaggcccttcgcgcgcaacaattcgtgatgaaaaatatgggcaggatcgatcccactgcaggtttcgcaggagagggtatcaaagttcgccaggggctgcttaagcaccagacggctcgttctgcttacagtggtgcccaggggccgatgaatccaaaggaatcaaccccgccaaaaagaaagggtaaacaaagttttgagaagaatctcccacagacttttgaacaaacaaagctggaaggagtagcatcggccaagcttcggtacttgctagagcaagtgctggagttccagaagaccgagaaaatcatcatcttttacgagcacgacaacgttgcctcctgggtcgagcaaggcctacagttaataggcgtcaaattccgcacctacgctagcgccgtgagcatgggctacaacaccaaatccgagaatctggccgcattccgccaaaccgacgaggtccgcgttctactaatgaacgtcaaacaagccgcgcacggcctgcacatcccagaagcctcacggatgtacatcgtcaacccaatctgggaacgcaacgtagaaagtcaagccatcaaacgcgcgcaccgaatcggtcagaaaagacccgtctacgtcgaaacgctcgtcctaggcaacaccctcgaacatcgaatgctccaccgcagcaaaaacatgacttccgaggagaccaagaacgcaggaaagaacccggtggacgacaagaccatgagcgagatcatccaaaacgagcccttcctacccatgcccgacgacgaggcctcggccggcatggctccgctggcacaaccgatcgtgctcttcgagcccgataacgtggtccgtgcgcccgggccaccgcgctcgagaccgctaagatcggccccgtcgccgtggaacccgccgcggggcgtagagcccaatgccgattccaattcggtcgatgttcaggggcaaccaccgcccaagcggccacgctttgcggagcaaagtcaggtgataagtgtgggtgaggctcctgcgccgcagcagcccgtgctcggggttaattcggcttctggggctggggttgctgtgtggccttggccgactagcgttgcgaatcctgcggcggttaactgggatggttttggagcgtctgatccggtgcaatttgtaccgatgggctctgtggtagattcgacggggaacggggttgatacgcgagcctccttgttcgggccgttcgggccgtgatgtgatatgtgtcattgtactttacgttctagcgctgttttttgctccatacccatttagttatagaatatcagcttattcaagtcaagagaaaagaattagttcatgccaagtacaatggagcagactaagggggtctacgagtaggatgtatcgcaaacaatgggattcggtctacttgaattttataggctactccaagacgtgatgatcaaagttatgcagagaaagtcgtctgcacaatttgagcttctgcgcgccttttactaccgtcgagctatgaaaatgagaaaggacgagaagatatctaaaaaaagacacggcaagacaagaccgcataggctgactcctcgtgctactataaatagggaaataattactccacaagaacgacatatcaaaagcatggtatgatcaaaggtaaaaatatcttattagagctagctacctacgaactgctgcgacatgtcaccctcgaattcccctagtcaagacctaactttaaacaacatgccatccttcggccactagatcatcaatattatcactaagactaaaacaattcgccccatcaaagagatggaagaaacctgtaactccaccattatcgcagctaaatcggtgccccgcagatagcttcgttcatacccacttccaacataacattcctgaagattatgattgctattgccactgttcagaagaaattcgagtactaactaggcttctgaaacaaggtgaagctattattacttataccaagtgaactaaagcccccactttcaggctcagatacatacttgccatatcaagtagttatatattttcgtttaatatctagactttttgttaatctattatactattctagtaagcttgatactaaccgaatctagtgtaattgaactagtcttgtaatattctaatcgtttgataccccgccggtagcttcctaataacaaggtggcaaggtaaaatgggatgaaactggagaaaagatgtgctttcctgaccagccgagtcagtcgatagtggtgttcagaatgagtttaagctatcttcctaaagttgctgcttaaagcatatacatggagtcgagactcctatctccttccaagccatttgatgtagcaccctcagcaagaagcttcttcttcttcatatttctgcgcctaagcagataccagcatgctgtgtagaggagcccagcgacacacgtcaaaccagcagagaccgcattaccctggatatatcgaggcttttgtgtgctagggtatagttgcgatgataccatagaagaaatatcagccatggtatataccattggcatggaaattgcacgtttggaatccggcgcaaaggtattagttgcccaggtgacagcgagcgtagaaatcggatagaggcctacaccagggattagaaatgggtatcaagagacagagctgactagagcctgcttaccaaggacgagaataaacattcccgcgtagccagcgccggaagacgatgttcccacacaaatcaggtaaccgacagcaaccggaacacagcagcctatgatgaataggcttcgtcgcttgagcttatcagaaaagtagacctgtgtcaaaagagagatggcaccaaggacatagacaggaatggtcatatagttagcctggagggaggtgtatctaattcagtcagcaaggtgctcaaatatctcgttcgatataggtacttacccgaggccattgataatagaaggcaggaagacaccgaagccattgattgcgacagatgaagtgaagaaagctatgcccaggaagtaaacaaatggatctttcagtgattccctagcccacttccagtcaaactttgcttcacctcggagcacatagtctcgctccctcttcagacgcatagtctccttctcttcctcgttaagataccatgctgtttcggccgaatcagggatgaagatccaaccaattccaccaatgaatatagtaaagcagaactcaacaatgaatagccatctccaagcggcaaggcctcttcgagttcccatagtttgaattccataggcaaaaaggccaccaaaagcgccagcaatgcactgagcgaggttggttgtcatgatacgctttcctgcttgttctttagggtagattgtcgagtagacgaaagcaaatccgggagacagaccgccttcgcaggcgcacagaatcatacggacggcaatagcttgaccatatgtatggataaaggcagtgccgagggtgcagatactccacaagaggaatgcagtaccgagtgccttcctggcaccaaaacgtctaacaaccagggtccaagggagctcgccggcaaaactgcaaaagctggatagagtttggatattattgaattggttgcccacaagacctaagtcttgctcaaagccgaagataacagcatttccgatctagtgaatggttagacatgaatagtttgtcaccacaccaagaattcttacgttgtttcggtccagggcggacaggataataaagatgagggaaactggtacaaggtatttgtcgaattttcttcgtgcggctgcttctttctggggatcaatgtagatagttgagctagcctcattagaccgagccgcaatgctgacctcagtgtcgatgactgtggtctttgtatcttcagtctttatatcaaagtccattgggacggcttgtactggggataggttctgcaggaagtcagatgcctctggagggaagacgatcatgaacttccagtggcgtcactatatactccatgctcagatactcatactgccagttcaacgtatacgccggaagacatggacgattgttgtctcggtcatggtgatattcgataaatgctgacataatctgaaccttgatatctcgataagcttgaaaatgataagacgcgcgatcggacatagccgaatagagattatcgcaaccaccctggggtaagtcggctttctccgatggagcattcaaattcatattgccttcgtaacctaccatgaaaccccgtccaggccatgccagcagctattctccatatcatttgttgatcccgattctcatctagaatgtcgcaaatgcaatcgtcattgcctccggccgaaaggctagcgaaaggaaaaggagcaactgcttgtctgaggtaggtgacccaatatcgttcgtatggtagatgattcggggctaaactaattcttagatgtcgtcggagaaagcagaaggtagccatactgtttgccctcggccgacaatctgattgctgacaatttgttgaacagtgtgatttgaggcatccgagttgctccaactgcgaaggcgcaggtgtcccatgcatgacatatcactcacagaataaatccacggtgagtctttctaataagagctataatattaccgcacttaactgacatacttgaaggttcctcgtaactatgtgtcggagctagaggcagaggtcgagaagttgactcggcagaaccgcgaactgagagcacgagcccagtctgcttcggttaatgatgagatgactaccccacgcgacaacctctccccgggaagtctggccgcgtctgatgcaagttcaaatcatgtgcaaaacttggtgaagagcgtcagtgatgttgttgtcgagccgtcaaggcagccacgattcttaggacagagcggcggcatcacccttgccaagttggtcatatcagcaatccgcgtcgaggccttgacctctcccctgtttattgagccacgctcgtataatcattcgtcgtcctcgatggcagccgaggcttctcttccaccgcgtcatgctgcagaccacctggttgatgtctacttccagtaccaaacgccccatttacccattgtgaagcgttcaagagttgaggaggccatagaaagcgcataccaagccgcgagtggccgggaccttccggaccgagcagtagaaacggatattttcatgtcttttatgatcttcgctatcgccctctgtgacgtttcaaacccatctggaggtcgaccaagccagagtgaggggtgcttcaaatcagccctcagtttgtacgaaaaggtcgttacgagtttggaaagtgatatcgagactctgcgcactatccttctgttggctcaatttattgcattgtgcccttcccgagggagtctatggcatctgaccggtatcgctttacgcttatgtattgacataggcttacattgggaaagcgaagatcaggctacgagtgtggatcccgctgtattatacgatcaccgacgtctctggtactctacatatcaatttgaccgtatattatgcatcacgctcggtcggccctttggtatcatcgacgaaagcatgcgtgtgccacttccaaatccatgggctgtctatcaaggagcatctagcagcgaatccaccggatttgatatctacagccaacgagctcataaccacatgtttagcttatcgatgcttgagtctgagatcaaacatgtgcaacacagccaagtttgggctccgaaaatagcctaccctagggcaaactatgcagtgtggcttcaagatatccaaccccgtcttgaagaatggtacgccactattccgcagactaccaaggctcacccatcatccatatttgcatatcaggcgtattgggactatctatataacaacgcagttatcctgctttaccggcccaattctaccggatcacaaacctccccggaagcaacagtcctctcttttaaagcctcttgtcaacttataggaagtatcaaaaccctacaacgagaagggaaggttgatatactctggaaatcggcccatcatctctttatggctggcctgggggtgatatacagcctttggcagtcgaaagaagtgcgagaccggaatccgattgggagtagcatttccgcgctgcaatcctgcgcctcgacacttgctgcaatggctgagagcttcccgggggtctcaggctgccgtgatgcttttgatactctatcggaagcaacagtcgattggctagttaataataatgctgcggaactacaccatggccgtcaagagttcgagaaacaagcagaggacgtcctgcaccggctacagccttctcgcagagcacatgactgtaatggaatggatatgtcaggcatgttgtcggctgatagctttgttttcagcgagatgttcagtagtgctgctcaatggcctgagcctcagcacagcgggtttaatgacatgggctttgacccaattgcaagaggaggatctcatatttccttgtaatactttcttaggctagaaaatcgatctaatgaatagctatgactaacgacgtttcttccaatgtaatatacatcctttggcgaattacacttcgctttacatgacggtagcttcatgctcaagtagacgattcaagaattgtcttctaggtgatacgactgtttggactatgcagtaagttcgacctgtgcgtaatccattggactcacagagattggaggagcgatgcataattgcttctgtgtatcgagaacctctggagtaagtgttgcagtttccaggtaatacacgctccagggggcgtctccttgtgtgactatctgcatagcaattcacatcagggtggcccgctcgctcggaacttacgttatttagttaaccttcctctcatgcagaaataatgaccatgatcggagatttccgacggagatttggcgcttatatgctaatcagtataccaatcacagccagtaactttttcggagaaaagcgatgctgccctactactgtggagtagatagatagacagcttcgttgggaagagaatttgcagacatgtgatgactgtatcgctcctctttccaatctacataggcaaattacttgagtatatagctacccctaccagttgaataaggctctcttggccactattcttctatacggagaaaattcatcatggctactagggagtcaattaaactctttaccaatcgaaactgcccatgtatgctctccgagtccatttttgctgcagaatactgacaatgactcgcaggggcacaccgtgttcatattgtgctggcagagctgggtctaccattcgaggaggagatcattgactacagcaaacctaggcagcccgagtatctcaagatcaaccctcgtggacaagttcccacattgacatatggcgaccatatcatattcgagtcagcttttatcgcacagtttctagctgactcagtcacatcaacgcacttgactccacgcactggagaagcccaaggagccctcatacgccacagaatcgccttctttgtcgaaacatacttttcaaaggccaatatctactactaccgggcaatcgaagccaaaactgatgaggatgccgatgagctcggcaagcggtatgttgatgccgtcgtcaaagaggtcgagccactcttgcaagacgcgaaacccttctttggtggcagtgacaagctgactatggccgaggtaattactctccaacccttttgaaacttcgtgtttggttatttccccaggcaaccgagatttggaaaagctgaaacggcttgtaggttctgactgcttcctttatcctgcggatttccacgctgccgcataccgaaaatgcgccgttgccaaataccatggtagctggcatggaagaaaaggcgccaaaattcttcgcgtgggcccaggctgccatgaagcatccgtctgtgaacggtatctataacaaagacggttgtgcggccgagatgcgtgatcgacgagctaaagctcgtggtttggtatgattcaattgctgtttgtcttgaaaaggctgttctgcaaagttttgcaccagccaagatacagaaaagtgttctgtacaggctattccgccatcctgctatggattcaattaaaacaaatattgcagaaccaactgttaattctacactctgtccctaattaatttctttgatttgaaaaagtagaacacaccgcatcgctaggaaaagcaaaaatgtacctctgattggccacattcacttggaatacaagtggttttcagataaccaacatgttcccattgtcgaatttcgagcctcccagcactgattgaactttgggttttctttaatgagtacctcgttacgcagtacgtggaaaggggataaatatggatttcgcgcgatggtcttcagtgtcactgtgctaggaggattcatattcgttttagaagcgtattattcaatgttcacagctaggtgctttttatccccatgctagataaattcattggtatgtatacccatatcaacggcgttgagtcctttaaaatttcgagatgttgatctgaaccaggaactcaggtttgtgctgacctgaatgaatcgagttgaacagatttctacttcctacgggtctatatagcatgatagcatgtgagcagtatgacataaagaccaaatttcattgtaataccactatgctagaagcttctagcatagacacttgctcaaagaataaagaagcacaaagaagacattcgctgatcaaaggctgtacatggtgtcaaggctcatatcgccttcaagcccatttgtagtcgctccctcggcaagaagcttcgccttcttttgatttctgcgtttgagaagaacccagcatgaggcatacagaaatccagcaaccactgtcaaaccagcagagacagcgttgccagttatataccttgggccctgctgactggggtatagttgggaagaaaccagtgaagagagatttgctatagaatatgcgatgggcattccaattgcgcgcttggagtctggctggagattgatagatatccatgttacagcaagggtggaaattggatagagtcctagacaaagtttaggtttagacttcgagtaaacatctgcaacaggctagatcacacttacctaagacgagaatgaacattcctgtataaccagcagcaccacttgctgaaccgacacagataagatatccaattacgactggaacacagcatccgatgataaaaacaccccgtcggctgattctgtcagaaaagtacacctgaataacaagtgatatcaggccaagaacgtaaactgggatagttaggtagttgaccgaaagagaagggaatccaagcccagaaagaatagtgggtaggaaaacgttgaatccgttgatagaaaccgatgaggtaaagaaagcgataccaagaaggtagacaaaagggtctgtgagagcgatcttgatccactttcgttcgaatttctcttctcccctgcgcaaaaagtctcgatctctcttaagacgcattatttctttttcctcgtcattcaaaaaccacgctgtttcagctgttttcgggagacaaagtaagccgagggcgccaacaaaaatcgtaacgcagaattcaacgataaatagccatctccaggctgcgagaccacgttgagttcccatggtctgcacagcatatgcaaaaagcccaccaaaggcacctgagatacacattgcaagattggtcgacatgatacgctttcctatcaagcttggcgggtagatagtagaaaaaaggtaggcgaagctttgagcaagacctgcttcaaaggaattcaatagcatgcgaacggctatagcctggtggtaagtttggataaaagcagttccaagagtgcagaagctccacaggatcaatgctgctcccagaggcttattagcaccgaaacgcttgacagctaaaacccaaggcacttcgaaaacgatggtgcaaacattggccagcagtgtgatattgccaaattgaccatccttgagtccgatatctttatcgaagccaaatactctagcattacccatctggtaaatattagagagtgtactgttactccgaactgaggctttactcacattgttctggtccaatgaggagagaactaggaagacaaccgagaccggaaggacaaatttatcaaatttcttcaacacagctgcctctttctcagggtcgatatatatttccgataaaatctcgccgacttcatggttgatctcttctggggtcttcgcatcaccctggagggaattcttgtcggattccggagacgacatagcaaatatttgcggcaagtcacgagtgggaagttcaaaatattttctctttgatcaagaaggagcaagatgtccatgggttcttccagttgtatacctaaataatatatatctgtgtactgtgatatagatacgtcgatctggttaagataaggatcctgcaacctcggcagctagtctcgagacgccaccggactaatccgactctctcaggacgaaaaagatcatgagatcaaagatatatgctaggtatatgtatctaactcaatctaagatttaggtatttgttgggataatgatatgacaaccgaaattccttgcaaagcaaggtcacgtgaatcaggtacttgcgaactaacatgaataggagactttacacatcttcaatgtcatcacatcatctataccataggggataatctctgatggataataaaagcttaacgacattatataggcatcggacctttttcgtatccctttataatccgatcggcttattcctcggcttatgccgatcgactcgttaatctgcattggattagtccgaatcgggtttgcatcatgatgcaaaacctccaacagcaaaggtcttgccatcgggaggtacttaaccttgggtgaactgctgtcattctcaaatacatccttttctcaactacaatctcttttgcctggctcacttttaaagttgctaagaatccatcatgcagccattcaatcttactgctactgggcacaacctaaactatctccctgaatatatcgcacgtcgacatggatttttcgaggagcaaggactcgatgtcaaagtttctattcccaacccatgggacggcgtccttgatgcactcgctgatggcacagccgacatggctcttggtggcatttgggtgccggcaatgtaccgcaaccgggtgaaagactacacggtctttgcacaaattgcgaatcgctgccctcttgccctgctctgtcgtagcccggcaaaagacttcaagatcgcggatgtggctggaaagacagttttgatgaagggtatcggcggagccagcgccggtctattcttcaaaatgtttttacgcgagaacaaggttgaccaccgatctgtcgattatatccaggatctcgatgggaagatgctgggcgagttgtttgaagggggaatgggcgactatttcgtgacggacaacctctcggccaaggcgatgagtgagcggaatcccaaaatctccgttgcgatgcaaatggtctcgcaaggtgaaattccatggagtgtatactaccaggagaccgcgaccatcacgcccgagggccttgatgcacagaggcggttctgcttaggcctccgtaagggtatcgaatgggttctggaacatgacgcagaatcatacaaggacgagctcgtcgaactcttccccaatatcccagttgatgtcgctgttgctgtgaccaattctttccgtcgcgatggcatgtggacgacaccaatcattccgcgccctgcttttgaccgttggcagctgggacttgccgaagctcagctacttgaggagcccttcttatacgaaaatctggtcaatgatgggcctgcagtgaaggctcagagtgagatgatttccttctcatgaatctaaaatggaagtctttgataatttaagactcctaagttgtctcatcttgggactggttttcgtacataagattttttgaatgtgaaatattttgaaatgaaagtattcttagaagacgagcatttatcaggtcgaaaataagatgaggaggttcatgatagatcctcgtggaaaattctagattttcgctagagagtaacgccgagttggtaaattctgctactttgaagctctgggttgttgattcagtgagctcaaagcagaaatttagtgatcgcaccgatcctacgtaagttgttttgagaatacgtttaatacttgaatacacgtaaaagcaaataagtaagacagatgttttgggaagataagaagagaaatgtcctttgtcggaataagccttaaaacattaggaactaaccttgaaactaggtgtaccacctcgcctaggtactgcccaggtgttctcttcattaaatgccacgatgcctagaagtgtgaaaggatgattttctagatctttgttggtattgtttcccgcatcatggatgtaacactgtctaaagctaagtatactagcgtattcatttttcactgctgttcatgcttatgcgtagcgtaaagtatatagtccgagacaaaatctactcatgcagttggaatagtgacataagatttcagtgatcacgattatatgtaagtccacctactggttctgtatgttctttaagtcttttcatatgtatacaaagtagtaaaaagcatagttaaaccgcaggacttccatgtatagccccgaggtaacctgagctatgaggtcagcgataagagataagcttttcctacaacacccctcacccgcatggaaggctctcaattctccaattcccccgaaattaccaagcgaaaaaaatgagcaagccagccgacgggaaagccgtgataatagggatctccgggccctcgagcagtggcaagacaaccctggcgcggctactgcagcgagtattctgcggggtgaatctcaagcccaaggacacccatctaaacacgttcataatccacgaagacgatttctacttcccggacgacaagtatgtacacctttacttccttctcaatacacatacccatcttaagtgaaaacaaccctccaaccccatcctaacccaccccagaatcccctacacaaccacccgcaccggcgcaaaaatccaagactgggacacagctgccgcaatcgacatccccttcctctcgcaagcactccactacgtgcgcgaaaacggcacactcccgccgcgcctccggagcaaggaagaccagaaccaccagacgcattccggcgtgtcggacgaggtcgtgcagaagttgcgggacgaggttgatgcgcggttgcgcggggaagcagcagcggacagcacggcgaacccgacggtttcgttcttagaggggtttttgctgtttgcgccgcctgggcaggaacggcacgtgcttcgttctgttagtgatgctattcatcttcggctctttttgccggcgccgtatgagcttgttaaggcgaggcgcgaggggaggaatgggtatgtgactgttgggccggcgccgcaaccgccagttcatactcatgatactgcgggtgcgggtgcgggtggggaaggggcggggggaaagacgaggacggaggttgatcttgatgctgaggatgatcggccaccgcagaatttctgggtcgatccgcctgggtatgtggatgatattgtttggccgcagtatgtgatagatcattcttggttgttgattgccgaggatggagataaagaggagaagggtgagagcaaggatcaagagaaggctgatcttgttcggagggttggggatgggactagggctaggactgatgttggggtcgaggttgcgccgggatatgggagggaaggaatggatgttgttttaaggtgggctgtcgagctgattctgggatattatttagatcagacgtaggtatagagttatatacatgaactagagtaatatatttctgttgtctcttagctgcagtgattgcctccttcgtagctatactaagctaccttatcaaagattgattcgcaattagccctcgccatctgacaagacagtgtggcgcgtttcagaggttaaatgctcactacataaggataatcggggtaagtagtgataattcgaggtcaaacatggtatggcaataccaccgttgttgaggtcattcaactcaacaaggtaatagtatctccagttcgctcaagattaggcttcagtaaacaggctaccaaattcctctatagacagatacaggacacaacgagtaaaatggatgttagaggctttaagtttctttgttctcgattatccctctatacactacatcacaaccaatacgtaagaatgtatcatatactcttccctaattaggtatgcctttaaacctagttctgcctctattctagatgccgaaaacaataaaaaaataaaaataaaaaattctctagtcatatgggccgaggtgcccgaggtattgcaagcagttgagagtatatcaggattacaagtcgacaacgttattcgggaggattggttccatcttgataccgaggatgatctccgggtccatccgcctaggtatgtggatgacgtttttgaccgcggtacgcgacggatcatctatccatgggtgcttggttggtggttactaagggtcagaggatccatggataagaagagctggatccagggtctagcggagactaagcttattcggatggttaaggttaagactgatgttactactcagatggagtaaatataactacgtatacagtggatcatcaatagataattgtctttatgtttgctatctgctaacggcagcgaggctgcacctgattctgcggtttcccatcatgtcccggtattctcccgttaacgatactgaaccatcccatcgtcgaaatttactcccgcgcaattggtcctcgccatccaagaatgtaatcaatgcggtctctcagagaaattggggtgacctcggcaggtgtggtattgacatgctgctgaacttcaggttgaatgggctcaagctgaagatttgactctgccaggacagtctccgtctcttgcaccacatcagcattggtagtaagatttcctgcgtagttcactgggccatagacatgcgcttcgcgggagacatggctgagcaaaaagtacgacgaggagatgatgtggacagacgccaggaaaacaagcaattgaaaaaagaaattaatcagggtccataaggtccacagaccgcgtacacggcgtgacttcgttcgctcagcgactagagtctcgaaaactgtcgatacaggagctggagtttccgcaacggtttgcgtacttgtagacctcgaagctggaattttaccaaatagaggctcagtcagtccaaacttgggaatggaaccatcttggagatatggtggagttatctcgacgtcgagcttagaatggttaagcccgggaacacagatatctcccaattgaccacatgaaacttcgcacctagtatcagcattctgatactttgaaggtacagcttcctgcttggtcaattcataaccaggggcataaatggcataatcttcttggagaacagtttcagcatcactgcagctgagcgtggtcttgatccatggcaaccaggtgacagccttgcctcgtggcagcttgatttcccacgacaccgtgaacatgtccagagcttgagggatgctgacaatattgatgcgcgagattccagtcccatctgccgctggcagctgaatagaattgatcagaggctttttagatgtaaaaacagcgtcaaactcgccgtccgggccgccatgcacaaaaatgcagaatttgcactgctcggcccagaagttatgattgatgagatcgatggagcaagcagcgttgtatttgatcagataggacgatgggtcgccagcctctgccacttcggcccgtatgagtgtgttgactttgtggtccttgagttgtccgaagcattctgcatcgcacttccggaacggaatgacgaggtttcttccaccgtagaactgggccatcaagcagctttccacgagcgtatgtcttttaaaagacgaggtcatgaattccattccctgacccgggggtgttcggaagtagagataaccagactcggactgggcaagtcgaggcagtccactaacgaccaactcccaccaatcccacggtttccctttctgtagcctgaccgtgagcgaaatcgcgatttggtatgttgcagggtagatattgggaggggtttgcaggtaaagaatgtcattgtccaatacgatcttgggcttgtgcttttcggcaatttctgcagccgtctggggcagagggagtccatgacatgagaaaaatgatgccgatccgatggattcaagaggaaaaaacaaggtctcaatttctttgtcactttcttcggtgtcagaaatgcttccgtggcacacacaagtagaaagtgtatcataattccgctgaagcaagttctcttcggtaagcggctcggtgccgctcaagtcagtcgtgctgagaggagtttctgcattgcaccaaggagagttttcatcgggctccggtacatttccaaccgccgctgcattgccgtttcgcgagagatgttccgatgcaacgttcggggaacctggcccatgactcggccccgagtcttgaggcaacggcatgttctccagcaccacgctggattcgtccggagtagcagaacgcctgtgagtacgagtggagttggcggtgttctcgatggtgctcggcaggtcgatgttgttcatcataagtttgcgtcgggtgccttggtactcatcgtcaggaggaatcgagtcaggcagagaagcagccttggcagatctcttccgaggtatcgcagagctcgggctacccaggctgttgacctgactcttggaaaggtcagagagggttgagctatccgagctatcgacccgagtgtgcatccccgagatattatcagtacgacgagagatacgccgagaatcatcatcccgcgaaccatcgtgaacaacgacgctcccaaaatcagaagcagagatattatcggtagggtatctctcggtctcatcagcatattcttggccaaaccgccaagcctctttctcaggtggagtgtcggtttcatagtgggattgggcttcaggcttcaactcgatgacccaagacgggcttttggtggtgtttggcgactggacattgagaattggtagattcaggtttggacggccgcaggtttgtagcttaattcatttcagatgacagtcagtactgagacccaacttgagggttggtttttcagcgttacctccatggagatcgtgatagacactggctcttctggaatgccactccagtcgcaccacacatcgaggttgctgagagggctgtcgttggggttcatggtgacgtccatggtaggctccatgagatgaaatggagatgaaatggggatgatgaggaaatgagaaagggaagatacacgagaggaaatatgatgaaaaacaaaaggatagggagtagagtagggagtagagaagtgaagagggagagggagtggaaggtagcaaacattaggaaggcacgtcaagatagttaaccatcccaagtgatgggtttatgcttattcgtatcaagttccacaacatccctactgtctatcatcttggaaagatcagatcatcaaagtcttacatcgtcaattaaaaaaaaaaacacgagaagcagcacttgcaattagccagtgatactgcttttaagggcctgtatatacaagaagggcttaagaataatctcacttttctcccaatcccatgaaagaaagacctcccccttttatccgccagcgcctgtaaaaataaaaacctttagccacccagttaaagcatcaagcataaaaaagagaataatgaaacagtcctcccggtctatcaagacagaaggaaaaaaaaaaagaaaagataatatcaagccagaacgtcgagaacgtcaagcaaatcattggggcgttccattcggggaatcggggtgatcgaaggtggctgggccggccacggagccaaatcgatcgccgtcaaccatttgagatggaagaataggggtattcgcctggttttggtcgaaataagcgcgtgtggatccattggttccttggggatagtcgcgattccgctgtagaggaggaagtatagacgagctagggggtaagccagttcggacatatccctgagccatcatccctgtcgaatccggggtctgtctcgggtccaaaatccttagctgggtattctattccactctcactggttcgcagaggggtgtcgtacaggagtaccaggctggttcatcgccatcagttgtcccacagcggcctgctgctgctgggtggatcggctttgaccggtaggatcgggaatctgggacatgggggctgcttgcatgccggctgatgattgcattcccgggtacatctatccaaggtcagctcaaagagcttccaactgccaggggggggatacgaaccgccgcataatcaggcaccacctgtcctgtggagtaggtctgcatggcggcaggcgtttggtaggtagctggctggccagcgtacatagcagccgttgactggctgtatggatccatttgacgggccattcgaccatccacatcatagatgccctgctgtctgccatagtcgattgaagtacgatgacgcttgactggcggctgctgagcgtagtacccataatctcgggccgtcggcggatagcctccataactagatgatggaggaatctgcaccgactgacgctccggagatcgagtagggactggtggatgaaagtcgtcaggtcttgtcgatcgtttcctgcggctgttaactacaagctttcacattcctatgagttgagggacgtacaacatggtgcgaggctctttgcgaatgcgcaatttcacaccttgatccgcaaatgatcgggagaggtgggttgactccatcattccagggaaactcttgggaggggatactgcaagcttgtcagaacctgggttccagctctctccacgggagattcgtacctgtgaacctttctgagataacggtcttcaaataagacacacggtccctgtttgcttgttaatttgaatctggaccaagctcccgaccgttactcactttcgcatctcgaacaaggtaaacttcaggcgaaagtcgccctcaatcttgaccgagagatctccaaagacgaaaaagccgccatctacaaactcgtcagtgaattagccccactcgaaggccagcctgaactaaccgctgttgtccacatccttcaaccggtgaagtgacgaaactagggttcctgctaatgcagtcgacggtgcgacgggtacaggacgctcttctgttgagtcgtacagactgcagcacatgaagtagtacgggctttgcaggtaatgtctgcgccaaaagtcagccagccgcgcgaaagccacggtgaattgcacacttactgtgcgaggtaggtgccctcctctcgcacccggagctggacgatcgggggcggatcgataggtttgcgctctgcaagcgtgattagagtcgggttttcggccagttccgtgggcctccgctttacagaggactagctaggactaggaacgagaaagaaagaaagaaaagagcttccatacctttttccttgccccccgccacgcgggcccggttgggctgctggcgaatgatcaagtcaaagtcagaactggtgttgttcaacattgtcagtgggattccctggacgaccgcgtaagagttacgaccctgtcaaagtagacacgggaagaacgactcacccctgagcttcgcgcgagagagaggcgtcggagaatgtcgcactcatcaagacgagtcacggacaaacaagggaaggtggagagaacccccgaattttgaggttgctttgagagcgagtgaaccagccgatacgcagtgtcgatcctcgggaatacaaagaccaggagcaagtgatctgtggttttacaagggaaagagtgggaaaggaagggaaggaacgggtctttggaccgacagaaatccagtggtcagcgaagataaggagcgaagagaaaccctggacgagtcacgatgtcgtcggagaggggtggcagctgtagtggggtaatgggatttttttttccgtttcctcagccttcaaccatggacgagcagacaaatgaaggacgttggagaatagagagagtgaggttggttgaaggacggatgaggttgaagacgaaaacggagtggtgtcgtcagtttgcaagcggaaagagccaaccgagcgcggttccagacaaaaaccttaagcggctctctctcttgatggtataacggcgccccgagaactgtcgatatgccgaccgaaattggacgcgcgagaatttcgcagtaaattggggggagggaaaaaaattcattcaaattcagaaaaaaattcaaaaaaatcaattggatcacagccttccaactctctcagttgtgaacaaatcagagtcgagaatcccacaaaaaaggaaaaaatcgacgaaccccgtgggattcagctggttttgtttaaaagaaatccgaaaaaagggagaaaaaaaagggaaatgcaaagatacccagatattctaccaccgtagcaatatcttccaagggaaaagacctgagaagaccggaggtgataaagtccaagtgtgactgcctgcctggaggggaaaggaaaaaccaaaagaagaaatggaaaaagaaaaagaataaaaaaaagaatcgaaaaagaaaaagaaaagaaaaaagaaaaaaacaatttagcccggagaaggcagaaaagtggaaatagaattcagccaacccacggttgggcgaatggcgatccggatgcgtagtaaaccgctgcctctcttctcgttctcgttggtccgacagagaaacggcgaaccgctagtccgttagtccgcgtctgggttctttatgatcgtacaaaaaacccacaaggttggcgccggatatgcaggtgatcagacccggttttcttgtccgccgtaaaggtgttggtctaaacgccaggtggactcgggccctggtccggcgtctaagcattccagtcaaaagtggagatatgcacgatcaagccgcatcgcctatgtccggggattgctgctgcgtctccactcgatctcagtcctggaatcattagccatgttcgaataatatcaggacacctttcgaagcccacgaactgccccagctcggatatcgctgccgcttgtcaacgaaggttctaaccatggttgggcagcctttcttatgtcatcccgaaccaaagaatgtcaggccctagacctcccacaaatcgcttggacacccccctaaacaaacaaaaaaatggaagaaaccataccttttttcgtgccctgaatgctcctttcagtgagaaatccaatactcgaagatcgcgcgtgaattctttggtgttgtgcgtggatcactggtccctggaagacgcgaaggggctcagggcgaaaggagtcagtccgcgcgcgttcgacgactcaggtccggcacagtcacaaattgcgcaaatgatcgagatcccagtcacaatagcgtgtggcacgtcgtaaaccccgagagcgacggtcgaacactggtcgaacaccttattccgatccgagacgaagcgacacatgccgagtcatgatgcagtggaaagcgaggagaaagagttgagtcgaggagcgaaaaggaagaaccacgaggcagcgccggagcaagactgggacaagacgttttaagggggcaacaacggatcaccgcacagggcttgccccgtgatgcgtcacatttcctgacaggcccaagatctcatgtctcatgcaagctactgtatgtcgactgcagttgggggcgtagacgctggttggttccggaaatccctcggtcgagctataggccggggcagcgcatcagccaatgcaaaaacacaccgaaaactgggttgcagtcttgtggcttgcggcttgcgacttgcagcttgcagatcgcgtgtttgcgtgataaaaataaaccggtactttctagtatggactacggtgctctgcgccacactcgctgaccctcgatttgcggctgaggatgtacggtacttttccccctcttcagacatcttccaggtgagtttggcatcggtaatgcacaagtggatcccagatcctaaggcattagttgctgtatcttgccgagaacttgcattccacactctcataccggaccgcttcttccttatccttttctcagcatatgcaaaaaaaaaaatctcaaatcctagcttgcatgcagatattctcgagtcctgggagtggcatcacggcgcttgccagcatgtgatacggagagctgcaggtgcagttggccatgacaaccattcctgtcacagtccacctatctccgcatcatccgagctctgatagcaacgatcatatgtaagggtgagaacagcaagactcaattcgatcagagggcgccgatcagctcgacaaaagtccggccccaacattgaatcatgcagccagcgtgagatcgttattagcgagtcacttgactggagcagatgggacccgctgtgggggtttccgacagcactcagctcccgagaacagcgtctgcgattcgcttaactgatagttcccacggacaaaaagggggaagtcgaataaggagggggtaaaaaagtaaaatgaggggtggaaaggcgggaaaacacgcccagggtaccggcattgtttgctctggctggggttgaactgttggttcttatgcattgccttacaccccggcgacaagttcctgggaatgcagtcgataggcccgaaaaaaaaactcgcagccctagatgcatatcatgatgcgacaagcaagccgcgctgggagcacgacctgtcacttccttttgacttccgggattcggctccggggccaggacagaagtcccaactctcgatctcggtcatggcggggaaagccaccatttcatctgctgcagagacatgattcaggtgaaaaccagcatgactcatcaagaccgataggaataattgggcgaagggttggccgtgacattggtgctaacaagtcgggagacacgaagagagaaaagagaaaagaaagaaaagaaagttcgagtgcgaaaaagcgaaaaaaattaaaaaagtgaccgccaaaaaggaagcgaatttttcgattttttttccttttcccaatttaaaagtacagcgcacaccctgacccaaatccacagcggccccgactgaaaaaaaaaccccccgggaatttgtcagtgtcgggatccaagctagttaacttacagactccggttaataaaaggacgaaaagaagctcaaaacgggacccgtggagatccaatccacaaaaaagaccaagtagcaacgaacccctgttcggtacttcaacaacacgaggtacggagtgtgccgtgagggaaagggaagaagggagggggggggttgccgcgatggagcactaaccaaccaactacaacatacatacggagtactcaagacggtaactgtacggagacgggagaaggggaaaaattccagattcacgcagacagacgaagaacctcacggtgaacaggtaatatatctgacagcggcattctccattgggatccagtggttaggcgctactgtgtttatgcttaaatgttggccctgcgatggttccgtggtggttgggcggtggttccatggttgtgttccctccctgacagctgtccggtccgtgttggcgccgtggccgccgatcttttgtcgatcggtgctttgtcgggactatacttattacttactatattattgcactgagatagttatcttgtattcctctttatattttgaatatatccttcaagatgctactactagtagttaattggttattacctgcgctctgtattggtcccaccgttcaccggtatggcctgaaatcctcccgtggtgggatactcgataactagattctgcagtgtaaccacgccgggaacccgcacatcagccacagcgttatgcctcgtccctcgtatatagagggggtctgggactacatacaattggctacaagatattatcgaggctatcaaaaatattttgttaatcttcttcctccaatttcggcatttactacaggtccttcctattcgaaaattttcaaccagcattcctgcgacaggactcttattcttggatatatcatgtgccaggcacatctactccgtatgtacactagagcaaagagctacccagtatttgatacattgacatgagacatgctaatcacacactgtactcattcatcgcagctagatagaaagtagaaaagaaacacccaagcaaaaaaactccagacaccctgctccgtgctggatgaaatccctcgaaaatggactagtaaatgagccagagaggaccgaagagtgccgcatgacactcatttcgtccccggacacccacttaacataacgtagcctttgaacaagaaaagaaatggaggaaaaaaaaatattaaatcgaacggtaggacaatgcagttcccggaaacacgtggaaaaaaaagagaagggagaaataagggaatcggaaatttcgttagaacaaacgccctatccacatgcgtaacttgctttgcaggcaaaaaaaaccacgaatcgtcagcttcaagattatcatgtctgcatcacgacatccccatccacttcgtactcggcgtcaatatctgcatctgcatctgcgtctgaatctgcgtcggtgccattggtagtgggcatggccttttggccctcacctttggaagcagactctagctcggcgggaaccataacgtggattttctcgaccaaagccttccggactgatcgcggtgtcttggggttatcgctggatcggcgggagactgctgttccaggcgaccgcgagatggagttagttttctcgggggtactaggtgcttccgtatcgtcattggacggctcggtagcatcaatgccattcgtcttgacaggttccttgggagcagcatttccattaacatgctccggttctttttcggtaccttcttcgagtacaggagccgtgtccttggcatcctcatcaacgacagtttcttcctcgacaactccgctctgttccgttccatgaccattcgcctgggtagatgttgcttcagctgcgggagagtccgtgagaatagagcttctcccacgacgagtgctgcctccgggggtgaccattgccagcccggagggtcgccgaggtgtgccgcgaccgccattacgggcagccgtgggtgtcattgacatgctattgattttggtgctaccagatgggcggccaggtctgcgtttagggggtgctgcaggaggcacaggaggccaaagttcgaaccgggagggtgggattccagcggcggggttggggattgcaggtggttcggggttgaacgcagaatggtgggagccattagcattaggccgcaaagccaatgtggaaggcggtccagcggagtttgcgagagtgtttccaaccgacgcattcatcattcgaatattgcgctcatagtcggtcgctcttgcctcggtctcatcttcatcttcgtccgggtcctctcgaggggcgacggtatgaatgggagcacgatcgaaatgagactgattactacgacccataatgtaaggtgtccagagcagcgcatctggattgagctggacgtagcccttgttttcccagccactgatgacctcgttgtaatatttgtgatcgagacggatggcgtatgtcttggtgatgggatcccgcacgagagctcgaagtccctccagggcggatacgatatcatctgccgtcattcctgtgcgatcagacagatctgcaatgctgacaggcgtcttcaaatcacgaagttggtatgacaaaatcaatcgccaatagtttcggtacgacaccagacccatgtcggagagaggcttctcgggcgatccatttttgccttcgatgcgagtaaggaggtatgagaagtcgataaggaggtttccgtagcctttgcgttgatggataggcagagtaagaatgcaggaaacgttattcgctgagcttggacgtttttctttactgaagtagccaacgaaatggcagcccaaatcgtcatactcagtcatgacatagaataagaatggctcaacgtcgtagtaaagagtcttggagcctaggaaaagtttcgcaagaaggcacagattttgacagtacactgggttcttgcgcccatcaacttcgaagattgagatcgattgatctcgataaatctcatcaccgggggggtgcttcgcaggacacttaagtttatggcgccaggcgacgaagtccgagttcatgtatttgagacagaactcgcaaatgtacagaacacggttacggctgtattcctctgggtaaggcgctgcataccaggtttcgatttcatagccaccaaagttgatagacttgatcttggaaggaggaccggaaaccttttgtgatgcatgtgctgtggcctcgccgctgagttctgcttccttcactttctgttgccattcatcttcggctttcagacgcgcctgttcgaatctgtcgcgatcgaattgtgtgggaagtgtcctggatgtatcttgttcgctttcagacagtatgcctccgtatggttttgatttggcgtcgtctgtctcacggtcaaacaaagtcatggagttataggatatggggggaaggggaacgaaatgtgcctggggttctggggccacaggtggcggctttggtgctctcttcttcttgcgttgcggtcggatttgagtgcctgttattttggacatttttgcctcgtccagccggaacccaataatcaattttccaaactgcctagttaccacgcggcagtgctctcggtccactgcgcgagttcgtctcacgcgtacagaacgtgtccgagcaggagattggacatcaccatcagcaatcgcatccccctccaaggccgcatcattcaaaattgggttatcggagcggaaagatgtttgtcgaagtctctttcgaagcacaggtatgtgttcttcggcctcgattgatgaggcctttcgctttcgaagcgatcgcgagctattgagcatctcgtcgtcaacgcctgtgttgaagatagaatggaatccctcgtcgtgtgtgccagcgtgcgcaggcagaagctctttgggaagggccgaggctccgagtgtggtttctgtcgttgtatttattatcgggtcaggctctaaattgttttgaacacagctgggacacctccatgggcctgtgttgatgttagtgcgtgtaaaacatcggagcgggataaagcagagatcgaagagcatgtgtttgcgtaccatccgtttcatcaaatgcttcttgttcccgagcgcattgccgatgggctgttggggtatcgagtcagtgatgattcaaaataaacagataaagggcagggcaagcagcgtaacgtacagtgatcgccacaaacaacacaagtgagccattcctcaaaatcttcgcttggatcgtgttcctcgtcttgactgcaaaccctattggtccgttagtacatctgattatgcgcccagtgcggcgagtccttccacttacaagcagtttgaaccactgcgaatatcagtctcgacgtcctcgcgaccattgctctcagcttcccagtcttcggcttctgattcgtggtcgcttgattctggttctgacgcgtcacgttcatttgcctcaaacccggggtcggcatctgcatcggctgtctcagactccgcatagtcttcttcagaacccgcgtcatcgtcgggtagcttgacagctccaacaggttcagccccatcattgtcatcatcatcttccccgttcaacttgatgctgccgttctttccgtccgcagtttcatccgggccatcctcatcaacttctccagtgtatgctcggtggacggcatcttgaagccgttgatccatttcatacaagtcagtctcttcttctccctccgcatctagatcgctatcggccgggtccacaggcgggtcaagtttgcccgattcatcgttcgctggcggcaccgtcgccgccatagtgaaagttaccgccaccgccaggttgagcacagtagtgcttattgtatgcgctgaggctaactggggtatattttttgtgaaagaagcttagactgatcgaagcaccccgctgacgtcggcgctgatccgggggtgcatctggatcaaaagcgggttcgaggctggctagagtggtaccgaagatatttgcgaacacaagtatcgatcgggattgacgcttaaagttttcaggcgcaaagttgaagctaaacaaacaagaggtgtcagtctgcggctggagtggctaggcatcgcaagcgcgtcgcaaaacagagaaaacttaccccaaaagaaaccagtgcaatatttgatttaaaagcgtaccagacgcgtcaactggcagtccatacaccggggcctgtctcttttacaatcgaatgcgatttgcagcggccttcacgccccttgtcctgtgagtgtcgttgcaacgtgctgagtcagcccaggctaaaccacttcgggcgggggagacctcaagcccgtcgctgtaggaagagacgctcccctccacactctccgcgatcgatctactctcctcagtccgtgagaggctttgtgactcctaattctattttgatagctctttccgattatctacatacccatacaaccgcacaccatgggtgtcccttttgaggctctgattccctatgggattatcatgaccgtacgtaccattggtcaatgcctgccgagactatagctcaccaatcgctacagatgtttggtgtgactggctacggtctccactatgtcaagcgttttgccaacgatggcaagaaggcgcgctggaaccgggacctgtgggatagagtaagtgtttcattctcgtcggctgcggtcgggacttagaggcacattagctaacaatttcacagcaaagtgagtgattatgagactatcggccgacccaaaagcgcctaggaaaatcatatgagactaatagcaaccaacaatagtgatggagagagacctgcgcatcacaggctcattccgtgggcagtccagcaaccaccaagcacccactggatttgaagtcagcaacccttggaaggtacgaataacagatcccctgtccctttggttccaaactccgtgcagaaacgctgacccgagacatagatcgagaatcggatctactagtttcaaaatgcaacctcttttcctttacgttcaatgtctgcgccttccttaccccatgatcatacatatccactgcaatttctctagaaacgtcgttgtaccatatcatttgttctcttgggtttcctagtagtccgctcagtctacttgagctccgaggtcattccccgaataccttggatctcactctcacggagatgcatatcgaaatacttggccagtgcctcgacgcggtcctcttcggtctccagcacctgcaagatctccgtttgcccgcgcaatctcatcttgacttctttacccgacatgatgcactgacctacgatctctgtgccgcttgggcccaaaagcattcgcatgcagacaaagacctgggtgaaccagcttgttcggctctggctggattcgaagttcatgacgctgaaatcctgtggtagaaactccatatcggaaaagcagatctgtggcaaccacttgctctcagggttgtatcttgtttggtaaatccagatcttttggctagagtttgtgaactcagcaatgctttctctgacaatacgcatctcagatggtgcgatagccgtagcagtagcaccttcttgaagtaatagtggagcagtggcacaattgtttccaaagccgacatcaacctatccatatccgttagcatggttcatacactacagtagaccttcataccataccatgtacttctcccctgcgatgatcacaatcagaaccatatgtccacttcggatcaatagtgtcagctctactgggaatactcggaatgctaaaccgtcggagaacttacaatggcagatataatccatcatccactcccttcgccgccgcatgactgactctacctccagtggcgtaaacaagataccccagggaccgcaagacaataaagaagatcccggtgttctccatgcaatatccatccagccggcgctccaccatcttctcaaagagacattccgggttcagagatatagtatgatgctgcgagtaatgcagcgctgaattgccccatgggatggcagtgagatgtcgcctttgcagctcacccagcgcagaaagtgcgtcattctcgatatcctggcggagatgttgaagaagattgccctcggattgggcggaatgggagtatctgattcggttcaagtataactccagctgttgatcggtatatgtgggtttttgtgccattgatggggttccttgttggaatttgtgtgttcaagagatataggaactgtctctggccattgagagtcggaattattcgattctctctcgagaggactagttatgtatgtcattggtattttgatgaccaatagtcttttccccacactttcccgcacatcattgcctccacgcgcagcttatatagtgtctggctgggtttgtgcataattcattttgtaggtgcctacatacacttttcagtgttatccgcctagtcaatctgtatagcttagaatagtgtatatagaaaaagatgacaaggcacattctatacaaatgaacagacataaacgacataactatggatatgcatgagtaattccaacaaatatcgcaatggaaacccgagaccctgtagttacagtactaataaatctaattttgttctgtttctgtacatatgacatgtatattgttccttgataccccatgtttcctgcaggttactgttatcaatcacctcggctatgaccgccgcttgtgaagaacataattatccagacataattaacaaatttgtatataagatatagaaaatagaggatttgattgttactgctctctcaatatcccaagactaagcaatacataggcttgtgaaacgtacctttacacgctccgagtataaatctccgatgatgtagtattcatccgatatccggacctacggacatgtggttcgatcagcgaatatgaacctttagctcatcacatttctctattacttcttgtctaacctctgctttgtacagtctaacgtctatacatattccaaacaaattccccttcctactgtgaaccccgcatctgaacaaaatggctacgctaaacgagcaacttgcgacattgactgagaactactcgccctgcgatgtatgccagcgtttctttccataaaccgtcagacgatgcatctaacatcctaatttcccaggtatcagacgccctcatcaagctgcaaaagacacccgagggcagcacagcacgagcaggctacctcgcagatctaggtaagccatcggcaaagcctctaactatatctccaataaccccacttacatctatcaaccagtgccattctcgcccacgacagggcggaatgaaacaatgcccaagattgcggctccggccacaacattcaaatttctggccaaagacgccagcccgccagcaatcgcaactgaaaatccccagaagcacggcttcccgccgggtaagcactgggtagatcacgtcggcgcatttcaagattcggatccctccggtgccggatctatcgttgtcatcgagcagcctgagggccagtactgcgctgtgacgggcgggatcatggcgacccggatgaaagccctcgggatcaaagccacggttgtgggtggccgtatcagagatttgagggaattgaaagccactggacttccggtttgtcgttgatctcccataggtttattggtagcgttactgattgattttcgcatggtggtagatctgggctcatgctacttctactgttggcaccaatgccgaggccaaggctggtgctcgtgatgtgcccatctcaattgggggtgttactgtttctcctgtgagttctagttcctgtgtgctattcgattgcttgatgatagagtgcagaatctaatcattagaatgcatttagggagatatcatcttctgtgaccccttggaaggagttgtggctattcctcgcgagctgctcgggcatgtgctcgagctcatgcctaaactcactaccatggatgagaaggccattgaggccgttgcgcagggaatgagcgtcactgatgcttttaagcaattccgctgatagcctactttcagccaaatgtatatacatataacgttaggctacggcagtctctatgtatatttttggtagtcgctttgtagctttttcaaatatctcttcacgtatcttttcggatgtatataaaggcaaaagcataaaccgtatagaggactttccgagtataacctctgaattgacgtgagattgatttattcaggtgcaagccatactgcaggcaagatctgatatggcttactgacggctaaagactgccgtaggtattgaaccagtaaggaatctacagcgatattattaccaaatgtatagcatatatgctggtccaatcttttggtattcgaagtatacaatacataacgagaaatctgtgtatccaaaaaagaaaaaaagggctaaaagccaaatcgctgtgcaaatatacaaccgaaactcaagttttgcttactccgacacccagacggcggccatacccataccggtaccgatgcacatgctggtgacaccgatcttccggtttgtgcgcttgagctcagtaagcaatgtgctgacctggcgagcaccagtgcagccaagaggatggccgaaagcaatagcaccacccttggggttaatcttctcagaaggaatgccgagctcattaatacaccagacacactgggaagcgaaggcctcgttgatctcgtaaatgtcgacatcatccttggtgatgccggccttctccagtgcaatggggatagccgcccaggggccgattcccatgagcaggggcttgacgccgacgacgctggcagcgacgtacttgccgatgatcttctggcccagacgctcggcggtggaccgcttcataaggaggacggcggcagcaccgtcggagatctgggaggcattaccagcgtggatggagccgtccttggaaaaggcgggcttgatcttgcccaatgactcggcggtgataccctcgcggacgccgtcgtcggccttcacggtaatggtcttctcctcgccagtcttggggtcggtccacttcacgtccaggggcgcgatctcctcgttgaagagaccagccttctgggcggcaagggccttttggtatgagtgggcggcgaaagcgtcttgggaagcgcgggtgacgccacggtccttggccatgttctcggacaggacacccatggggaccttgcagtttgcggcctcggggtggctctcgaggaggtcggagaactcggtcacggcacccggtctgtgtcaacttgttagccatagtatcgaatgatggaatgccagggcttgaagcatacccgtactgagaggacatgctctcaacaccggcaccaatgccgacatcgatcataccagcctgaatggcgttggcaatatcagcgatagcctggagaccgctagagcattgacggttcaagctcttcacggcggtgctcgcggggaagccggccacgagagcggcagcacggaactcagtagcaccaccaccgggggcgaggacggagcccacagcaatgtcctgaacgacgctaggatcaacgccgctcttgttcagaagagccttgaagacaccggcaagcagatcagcaccagcggtatccttgaagccacccttaccacccttggtgaaggcggtgcggagggcacatgtcacgacaatatcatcggggtgcttctcgatgatagcggcggctcccttcttgccgccagggccgaagtgggaggaaacctgattcagacgttgctgggctatagatagaagttagcttgctgattttatttcgattataacttggaacaagccactaggcacaaagtattctgttgaatacatgcccatggctgttacgtccacagcacttaccgttagacatgacttcagtctgttatggaggtatgggagaggtatgaggattaaaaatagggcgaaagcgagaataataaatccaaatatccggggaagccttgatttataaatcaggcccgtggagtcggtggtatttcccctttggacgactgccgttactggccgttgtcgcattctgggaaagtgccgaggtccatttggccgcatcattgttgatccgtggcagtcacgggatctccgactggtggatcgtggggcatgtgaaatcagatatcacatgcgaaggttttgcgacgtcatggtaagtagatcggcccgacataagatggtgcataatatcgatatttttcaggtgttgtttgcacaaaaattatttctctactggtatctcactttgaataccgagtataacgacatgtatccacaattaactcggaatggcataggttaatgatttttaacatttttgtcctcatatatcaagaaaggaaagtttattctaatcacatcccctgatagctcagctggaagagcgcaagactgtaattgtcctgttctgcaaagaacctgtcatcttgaggtccctggttcgatcccgggtcaggggatttttttgtatttttgtgctacgtacaaactttgcctctctggtgtgattcctccctaacactactccgatccaacacaatgaccgcaaattcctatacggtcgcggatatcaatctgttgtctgaattcctcagcgacaatcaagtacaaaatctctccaccatatcccctgtcgactgcattgtcatatgcgcctcagccgttctccacagtgccgaggttcttttcaaggttcttcagcaaagaccatctcttaccaaagctctcgtactgtgcgggggcatcgggcactcgaccaagctcctttacgatgcagtgaaatctcatcccgccttttcgcggattgccgatgagatccaaggtctccctgaggccaaagtcctcgaacgaattctagacgagttcttcgatcgatctctcattaccaaggaaggatgtcagattctccttgaacccctatcaacaaattgtggacagaatgcttcattttctcgcaaagtcctcgatgaagcgggctttcgggcaccagccacttgcattatcattcaagaccccacgatgatgctcaggaccagggcatcgtttgagaagacttatgaaggtgcccaacctccagtctcagttattagttgtccggtatttgtgccgcaggtgcaattgtctcgtggcggagtcattgagtattcagacatgtcgccgccgtcagagttgtggtcgcaaagtcgttttttggagctgatcatgggcgagatacccaggttgagggatgataaagatggttatggtcctcggggacgtggtttcattgctcatgtggatgttccaagccatattgaagcagcttgggctcgactacaagtggtggctaaaagctctagatagggatgtagagatatatattgcgaataacacagacggacatgtgttgtaccttaaaactacaaaaatagtcggccgcgtttgtggcctctgtcattgagaacgacatgatttagctagctcgatggtaggaacttataacctttgacatgtgtactgcgatagaataagaaccgaggcatcattatggagatcccgtgcatacatatacctgcaatgcaagtacggcccacaaccccactacaatatatgtactgtacaccgtggaagtcttgagtctagagtgaacttcttgactgtttcaaaggattaaaaaagaaaacactcagaaatattggaaagatataaaaaataatcccctgacccgggatcgaaccagggacctcaagataacaagttcctttcacagaacgggcaattacagtcttgcgctcttccagctgagctatcaggggatgtgattggttgattagcatatttgagcattatgaaccaaagccatccgacctggcttatacccgagttgtccactttaacttaattacaaccttggaagactcaattacttgtcgaaaataaagctatacccactcactggtcaaggtcggtgtatctagataagctggcggcaaaataccctccaaatcagctttgagttgaagcgccaatgtcctcgagtgccaccggtgttgctgtgtatagccacccatcacccaaaagccatgaaggcgtgactgcctcttccataagccacgtatctcgccctcggaatcaacaccccatgtggcgtcgatgcgagcagcaatctggcgaggcccaagcttctgcttactatcggcctcgccgtccacgctattcttgtcatcctcggcaccgttgggagcctgacctggagagcctcctaggatctcagcggcagtttcgcgcacgtttttatcaacaaatcccgtacaccagatgacagcatccgcctcaacatggctgccatccgagaaccgcagcccagtcgccgtgtatgcaacaggctcaacattagctttgataccagccttgccttcttccaacagcttggtaccgcccacatcgacatagtgtccaccagcacgctcgattaaattttgcatcaaagcacattctgggttattgctgtctaggacggggaatccagctgctgccagagctttgtagcgatctggctcctgtgatgcgaaatgcgaaaacaagttgcgggcgaattgggcatctatgactgtcgggattgtcataaaacagttatccgcgagctcaacgctggcatcataggcgcctaggctggctgggttgttgacgtagtccactgggactatgtatgttggcgaacgcacgttcattgtcacttggagtcctgcagcgtggcaatcttcgagaatgtcgaaggctgtattggcggagccaatgattatgactgactggagtggaagtaatacggtcaatctcggttcttttcgcatcggagcttcacccaccttcgcccctttctccttcacttgctcggcattcttgtattgctccgaatgaatgctggtacctttgtacaggtaggaatctgctatcgatggtatattcactttttgggatgcaatacctgtggccaagataacgtgtttagatattgctttacgttgaccagcaggagtctggaacttgactatccaccgcttagtcgatggatcatactctgtccattggatctgtgccgaggtgattatgttgagattgaaagccttgacatattgtcgtacctgggaagccagatcctctttcgaaagacgatggggggtaaggagcttctggtcatagtctggtttccagatttctatcagtcgctcactcggatatcaaggcatgagcaacttacccatatagggcaagtgacagagtgaagtgaggacatggaaacgcatgctatcatagcggagagcccagttgtcccctgcgtggacattgcgctcggccatgacactctcgactcccaatgctttaaggcgcgccgcaagggcgatagctctttatcatccagtggcaggttagcatggatattgttcgaggctttttcgtcttcttacgaatttccacctccaattatgaagacttcagtctcaaagctctcaatcccaccaaattgtcttccgggagaatgaagcaaggtctcattctctttctgtatatccagatctttgagaatggtgctgagaacccagatcttccactcgattatctcgttggcgcccttgaccggcaggagtatcacctttcctttgcaagtggcggccggtgagctggtttgaaaggcaattccgcagtcaatgaattgctgtgcaaaaaaagtcagctaccattcacccagctctatctccacaggtcatgctcacaagaactggcgtcgcttggataaatatggccccgccatcgaccgttatatctcccttgatggccctcagcttgttagtctccagaagactggcagcaattatgccaggtgatttgaatgtccgcaggtggtatgtcagtgctagctgatccctccaatatgcctggtccttccagaagcagtcttccagcgcccccgcatcattcctagccagcgcggtgttcagattatccaatacaagttgagtttgcttggttggttcataatccgccattgaaaccggatctaccattccaggggcgagcagaggaagcgggttttgagccatcaacttgaggaggtcgatgcgcgggggaaactcgtcgcgcgacagggacatattgtctgtggatcgcacattagtcgtcaatacaatgcctacgcaccaatcttctaatgagaactcactggcagccattgttggattgaaataaatgatgtttgccttgggtgcggtatgaagattggacggccctccctgatcagtcgacctggcgataggggaaatgtcccgcatattggccgattcgtctatcccgtcttctgcagtccttagtcgcccgtatacgggttagtgcagcgatggcccgtgtttcccggtggaacacgaggccttggggcatggcagagtatgtctcccccgcaactttgaaaccaatttcatgccttgaatattacctttcaccccgtcgaggtgcccaatttccttcaaagaatgggccatggtacttcgtcggttgttaatgggcattgacctacataataagcagtcttcatacgagttgaaacctcaaatatggggccgtgcttggtgggggagccactaaccttttcgtccaagcttcaattgatcggcggtggtatgtccgctgtcatctgtgggagatcatcatttgtttgaaggcgcatgattgtctgtgaattgttcatgattgttccctcgggtcttgttggcttccgatctatttgaattggtatggtgcgcgccacctttttgttgtctttggggattctgccatccaaatgtgggttgtatagatatcacttggctacgaaaaggcatcgccctgcttgctacgagactataaacttcctaatactaaagcgtccgatatatttgccctaggatctacgctctacaagctagttgctggtaaggacctatatagcgaactctctggggctaaatccgatgacccggatattatcaaagctcaaatccgaagaaaatgtatggtagatcatgagattgaaacacggaccatattcctgatgtctcttattcggaggagaaatcacattaggttgttggagaggcgaaattcccactgcccaggcggcacttgattttgtacttgaaagatttcgtttaattcatacatgaatatagaggcaaaggagcgcaaaagtccattacaaccattccattccaaatgctccattcaatcaaacctaccaagctcatgcccgtgcagcccgtgcagcccgtgcagcccgtgaagcccgtgaagcccgtgaagcccgtgaagccctgaagccatgaagccatgaagccatgaacccccatagagatccacgtacatattcatagcttagagttataatttgtattcgtccatatacgacaagcaacgactcggcgaatattatatttaccgaaatgcaaggaccaagcagaatgaatggccataagggcggagtaagtatgagaagatgcacttgtaataggtgaatagaatagaaagcgtagaaggtttagaattgattcccaacgataaaagacattgggatgttagaatatgagttccaccatgctggtccttggagcctatatagtatgcttgctataccatggtttgttcatacggactagctagcccgatagcgcagccgtggccaacggtttcgcagcaatagtacggagtagagcagtaactatttaccggtgaagtcaaatacatcgtatcagcagtgagaggatacatatctaacagttttatatatattagccaacagaccgaggcgggacgtgggttgtgacattgaagagttggccacggactatagtcgcagatatgagaagtcagttctatacaatcagacagctggttatccgaaaaaaaaaaggaacgttggagagaaacctcgcagaaatcagatagcgcatacatactccatacgatctatacaaatggagtttgggaaaataaaaaaatcccctgacccgggatcgaaccagggacctcaagatgacaggttctttgcagaacaggacaattacagtcttgcgctcttccagctgagctatcaggggagtacatgatataagtggcaggattgtatattataacccaaaactacctaccagacatcgctcagtgattcacgatccatattcccaagaatcaccagccaatatacctccaaccgagccgaaagccaaacagacaaccaaaccaagcagataaatacccatgatccgacgcgccctaaccgccgcctcatcagcgcgcgcatcacccccaagcacattgacaagcgcctcagcctgcaagctccaactcacccggccatcatggcaccttgtacgcgacccgacccctcgccaagcaggagcatataattagaatgcctctcgagcatatctccaagcccaaacctcaagcaaaaaactaacagggaacccgcgccaacagagccccagcaccacccgcctcttcaccaccaccccgttcacagccttcacagcatcaccaccaaccaaagacccctcacccttccgcctcgccgcaaataaacccgactcctccccgccctcgttcgaagatgtctattacagccagtaccagccaaagcgccaatggcctccggatatgtccaagctgtctccgaaacaccagttccggcttgagcgcaagtaccggcggcgcgcggcgctcaagtatgcccggccgaagtttatgaaggctgttttgttgggacagtgggttgttattggatgtgagttttctcttgagatggggttagggttggaaatttgtggattgcgaattgcttatacacttgcggtggataatggggttggatttcgaggaaagatgctgactttttatgatacgtagttgtcattatctatgcggtgctatttatggagtgggagtcggatgatactgcattccatgcggtaagatatctctctggaaattatgctcatttgtgtcttgactaacattatttctagattcggaaaagcttctttgctggtctacagactgtattctccagtgcaccacctcctggcccgagaaaggatcagaaggataatacagcgtctgaggagagctcgtagtcgagtcatatttatgtctgacatcaatatattctgtaaaatattcaactagattccctacttgcacctgcagtctgccagaaaactccaaaattcaataagaaaactactgtcgattcatttaatcctcatatctgttcatcatttgtcgtgaagaaatcctgtcggaagaacaggcgtcgctgtaccatggagagaaggagaaagagacaggaaacatcaacagtctgtctctttctcgctttttgctccttcgcctgtgccaaatatggcttcattacatcatgtccgcaggacttctctggacaaggaaatgcagtcaacatgccaataacaccaagaatgccaaggcctgtcagaaatgacagacgaccagtaaactccaaaggtcaagtaaacaaaaaaacaccaacaaaataagttggggtggggctgcttgaggaccagccctaacgccgagtcatgatcgtatgaaacccaaagaaaaggatagaaaataaagacaagagaggaatgggaaattcgttaaatggaaccggggaattgcgcacccggttcttaaagccagctgcgcaggtcactcgacggggtaagcgggccagcagctgggcggttgtccgcgaagtctagagcaagctccagcctgggcggccgctcatcgaccaggccttttctaggactaccaggcgcaaccttcttgggtgatttggtgggtgagccaggttcgccacctcggggcgggccttcgcgtacaaaggtatatggccagccatcatcggctgcagctgcgacccaggttcgcaggcaatcatgcacagaagaatagaacttctccttgcaagtacgcagactaccacccatgactttctcaaaaccagaggcacgaagctcatcacgaagttggtttcgctcgtcagtggtaggcagcatggcaacgaggccgtttacaagatcgagatgtgctgcaagatagttggtcgcatcccattcaacacctccaacgtatggggcagctggaacaggaggacgagggactgggaagtgacgctcgttataaggacgagtgtctactggtatcttttcgccgaaaaggtcttccgacttggggaggggaatcacatttaggtgatgaaggaaaatccagaagacctccttggtcacgttggtaatctccttacaccacactctatatggtcgcgactggtaaatattcgcaatgaaagtcagtggctggttgtccactggtggcgctgggtccctcagataagaaagaatctgcctagcgcgcttggctcccagttcaccaacaggagcagtggagagctgcgtaaacagcaggtttgcaatgataccccgagtggtgaactcactgggacccttcttttcctcgtcaaagagcatatgcagcagagcggggaaaagttcatcctcgatggcagtgaggtgtgctagggccgcagatgtagtgcaaagagccttcagacagagcaatgcctggtgcagaagggtgtcttcgtgatcctcactgtagacgggttagccactggttaaaaagagggagacagggtacataccgccaggtcatcttcataatgcggtagagaagctgcacaatctcatccattcccccttcagtgataaagtcattgacccattggacggtttcgttacgtaggagaagacgcagtttgtgcatctttcccacctcaaccatctcgggcttttggatctctctcaggtaatgcacaaagtcggaaggatccgctgcggtatcgacagcggccgcatcagcaagtgatgctgttgaggcattggcggacagggtggtgtagacaccaacaggctgagaaagatccacagaccttggccgcatccggcttgatgctccactatcccttcgcaactttttgccaggcgacgaggggcctttaaaggagaagccgcggctcctagatcgtgatcgagagcctttacgatcctgagattgggagtcttccttggattctttgccgcgtcctcgacggctatcgttgcccgcgctgggaggagtgatattctctgtccgatctttctggataaaatcagccttgatattagtatcaagtgagcgcattttatctctcatgttatgagggatgttccttgcatcctaacggtaggttagccttgatattcaaatcggttgtatatagtccggccaacaaaccagcagcttctcgaactcgctttcgaggtccttggagttcagatgctgatgcacttcagcatctcgcccctttgcattgaatgcagagatagcagcctgtacacgggaaatacgcttgggctcttcttttggcatggtagacggggatatctttcgtggactcggtggccccctgctcttaaaagaggcactaccgccttgcccaatggggtcgctttctcccgaaggtgcgcgctgcaacccaagaatatccttcacctttcggtttcctgtaagaatctctgacttcggacgaggcttatggtcagtcggtttggcgagggagggttgggagtagtcgcagaagttgcgttgctggcttggcccgtaacccttgggcatatagagagagacctcgtcctctacggttcgcctcaggtcggcagtagagttcggcctcgatcggccaatagcctctttgcgaaccgaggccgagtcctgtgaccagactggggatggcatgttatcaatcaggtcggtcgggctgcggttttccttgtcgcgactctgtttcgagccatccttccttccccgctgggacctcttgaggatggccgagagactattagatgatttggcctttttgggcgacaggtcattctgctcaagtggctcctccgatttaccatccctccgctccatataatttctgagagacttcaacgagacagcgctcttggtcttcttatgaagggcacctttgctttccttgccgcccatctttggcgcggccactccgtggtcgcccgcatcacgattggggacaatctcactgagtgggtggtagccagcaatgaaaccaggctcctcggtaaactggaaagggatgctctcgattggcttgcatctcggcataggtcgcgcggcggcggcatcgtcggctgattgattccgtttatgggttttagacgacatcatggcccggaacatggactgtttggtaggggatcggttcgcatcgtcaaagatcttggggccagatgtactcgcagccatcgctatcctctttgaccagcaactaggtacatcttgttagcagatgaagtgcatgaacacctgtggaggggaacgggtagttgcagttcgaactcacgggatctgtgcaaacaaacgcagaatagaacaacaacgcggtcaaaaaagggaggtggtcaagtaaacccttcaatctcaacaaagaacaaaaatgcggggaaggggataggccgggtggaagaaaaatagaagactcagatgggcaagctgcggaatttgaagaatcaacggcgccttgctgccaacagcaaccgtcatcgagtatcaagatgttgatccacttcgcctcgacttagcgcatgagacgatccttggggttggctggatggaaggtggaggagtaaacaacgtgcgggtaaagaggttgcgaggggcaacgccgggacttggcggtgaacttggagtttattagcaacagtgcgccatatcgggtctgtctgcgctgctttctgggggctagacatgtcatattgcttattattgccattcatttggggttatttctcagcttgcatgtagtccttgcatctttttgtttatttgactgtgaatgtgaatgttgttgttgttattgttgttattactgtacgcatccggctagttgtatatattggatagatccttgattgacacttgatacatctactttgtaatgtaaattatatgaaataccaatagcatctactaatctacaatcgtatcttacagggtatagtttgctactatcatgcctctttgttattgacctatgccgatgccggcaagactggccccattgagaataaacccactatcgtattacatgcagttatgtcgaacgacgctcaaaccactttttcagatcttctgatcatattttatgcagttagtgcgttgagtggaattcgatccacaaccgtttgcgacttccggtggcgggtacttaaggcgatcctttcacttcaaacgcagacataaaagacgggagaagaatgtaaaactgcgatctaagcggtgctttgaaggatacaaagcgatatatgagagacaagtctggtttatgtacaacttagggtttgccggtgccagaacggcgaatgacgaacatcgggcattttcggactggcagtattccaccaagttacttgtcgcatatttacattttggtctacaccccagaattcaaggcttaattcaagataaaatcatcttccagagcagctaaacaccagatcgagccaaagccaagcctgcagcatgaattgcccctcgcggactgacgacactctcgagaacccaagctggaatcaaagcccaccgcccttcagcccagacaccactacacggaatgactttaatggtctcgccaattccagagtacatcgcagacatgccagttcggccaatgcagctggagatgatccactatgcatcgatgacagacccatcagtcagcaggatcaagaccccggaaaggaaaaggtgccaagcggcgaagtgaccgctgcggactcgggaggtgattcacccccggggagcagcgggtcacctcgccactctttctatactagcttgaagtcttctcctctgcactgcgctcaaacgctcgttaaattcggccgttttatcggacctggttttcttatcgcggtcgcctatatcgaccccggaaattatgccaccgatgttgcagccggtgcagacttcaagtacgccttgttgtttattgttctcctgtccaacctatttgcgattttgctgcagtccctgtgtatcaagctgggctctgtgactggtttgaacctggctgaaaattgccgagagcaccttccgaaatggcttgtgatttttctctacatcctcgcggaagcggccattattgcgactgatattgcagaggtaagtgtcccgttttggatagaggtcctaattgacgtactgacaaacttggaaggtggttggatcagcaatcgcgttgaacttactattgaaaatccccttggtggctggctgtgctatcacactagtggatgttcttttcattctcattttctacagacccaatgggaagatggtgggacttcgactgttcgaattctttgtcatggctttggtattaggtgttgttgtctgcttttgcattcagctctctctcgtaaagaaccagtcagttggtgaagtgttccgcggatatgtcccatcttcagctattgttcagtcagaagggtaagtttgttcagctgcctctgtacagtattcagctactaacgcatcttcagtttgtaccaaagctgtggaattctcggtgctaccgttatgccacactccctatttcttggcagcggcgtggttcaatcccgtcttaaggaattcgacgtcaattctggttacgtggagacctctatgcctctagggagcgccgatggcgaagtcaaatatcgcccgtcgatccatgcaatccgcggctgcatgaaatactcgatcattgagttagcgctgtcactgttcaccttcgccctgtttgtgaacagcgcaatcttgattgtcgcgggtgctgctctctacgatctccctggcggaggcagtgccgacctgttcggaattcatgacctgctctctaagtcgatcgcaccagctgccggtttagtatttgctctcgccctgctactctcgggtatctccgctggaatcgtgtgcacaattgctggtcaaatggttagtgaggggatgctgaactggaccatccgaccatggcttcgaagactcatcacccgctcggtcagtatcattcctagcatcatcattgctggagctgttggcaaggagggccttgacaggactctgactgccagtcaggttgctttgagcgtgatcctaccgtttgtctcggcgccactaatctggttcacttgtctcaatcgctatatgaccgttcggaccgaagaagcttccgaacgagacggagaagtcgatgtagtgacagttccgatgcggaacaacctattcacttcggtcgttgcggttcttgtttggattgtcatcgttgtgatgaatgtggccctgctggtgctggtgggactgggcaaatcatcttaatctctagatgctgatcctttccagacacgagcacgccccggattgtagcgaaaatagatccatagagcttgataataccccctctaattgctatattatgacacatggatggcatgagatcttcaaatatgatatgaggtagcttattgcaacttaaaataaacacccaatcaactccgttggctgcgccttgacacagaagaacacccagttgccgctaaacaaaagcacgctttaacattagtcttatccaagtccgccagcggcctccttgaccttatgctgctccggcggctcatcaataaactgcggtggagccacctcatcctgtaggaagctcggcatagcactctcgcccatgctgctctcaaacatagattcctcgcccagcgcctcaagctccgcatccaactcggcctcatcaacatcctcaggaatatcataggcccgggagatactctcttgaatctcattcccgacctccatcagatccgccatctcatcctgcatctgctcgatcttatccacgtcgaccttgccatactgcttcttgagctccttagtggtcgttttcatcgcatccaccgtcgtcatcacattcttcaaattatcctgcatcatgcccgcctgctccatgttccatgattgttgggagagttggtctcgctgcgcctcgtattgtttccggcgctgcaggaccttgagcgctttctgccggagggcggttttgccgggcccgtcgcgcatcttggcgattttagcctggtatgtggagagttcggcgttgagcgctgcgagcttgacatctatgctggatactcgagtgtcgacctgttgtatggttagtggggtaccttgaggggcggggatgggtgcctttgatcgggcttgtgcgggcatcgtacattgctaatagcaccttgaagagtcggcttggggcctgtggtctttgtgccgaatagtcgattcatgatggtaggttgggttggggtggtttattattgaaaggtggaggtgagggcaaataggcagcggacttgacagcgattccagaccgcgcgaggccagtgcttaataaaaccgcgatcggtgggccgagattgtaattaccaatagctggggcggagcacttctgataaaagctggcaaaatatagaatactggagaatcttgaattgtttgatatacaagtgcatgcgtatgacggatttccttgcacttcttggctttctcttttcgctttagtgctcacctcttgccgcttttaaatcaccgagtaaaactgagcactccctagttaccttgacttgatcacgggccattatataatcagcgtgatctgcccgctcactgaacatcatctaactgagcatcctgatttacccactagttaagtgctctctaagtatagggaggagcggcctaagtaagctatatcaataaaatgcgatgcgctaatcccatcacgtgcaaccatttctatttagatcgcctatcaaaaaaggactggcgtagtcaacgtgaccgttcattctagcggcctcaatcctatccaagtgaaaaatttgcagtagggctattcaatcgacctatcgttttcccatttcagtctatgcttctggagtctctcggaatacttcgcttaccagaccggcgatcccctattcgggctttgcactactaccagggcgagggtgattggatggatttccttgaaggttagaggtccaccctatatcaaagcaactagagtaattagttttaagaaggtgacgacgatgaattacttctctcgttaatgagcgcataagttgaaagcttttctgaacgtataacgtcatgtctttcgcgccatttctaagtaggtcgtaaaccgaagacaaaccatctattactaaagttctaagggcccatggctatttcattttaatcctaggaattctaagaaccacccgttttccctagcatttctaccttagatgatgccattttaaaagaggtacatatgtctagtcacttgctccgaaaacaatggtcttctcattcctccacatccaagttaattttagctagggccatgcgtgccgaggtttctgcgctaggcaggggttcaattccaaattaattagcataatcaacagtataacccccatttctcttatccacagcccttaaaggtcggaaggtgtgatgaatgaagtcaatatatcagtggtagatctaggagatcatgccgcatggactgtgcgctatgcatgcatgcatgcataggacttcagaagctcacgttccgtgacgataggggcgggctgcggccggttctgatcgctttgtttttttggtgcaatgaggtactagtccgtggttagacagaagcggtttgaaaaaaagaaaaaatataacaattaaaccaggaatttttgacggagacatgcacgaagtacaaatatacgtcaactcaaatcttgcaggagccctttagtctcctagtaccattataatctctccttatgtggtggataatctatgaacagcgcccatgtgactgaaggctacttggtcggatgaaaaaagtgctattcaatgttgcgtgccagattccttttaacaaaagaagtgcatttctaatcgaatatcaagtatggaaaaggaaaagaaaagaaacaaacgtgaaaataacaaatgggcttttatacccctttagggacaaagccctattctcgtttcccctagaaggaaggtacgactgcctgcgcaaacgaccaacagtataatcctaaacgggaaagtacgagtcctataagtgctaattgtaatataacccctaggtaagaatacatttagtccctaaatactggcttctcgtcatccacgtggtcgtccaatatccaatcgtcttgcgcggcctcgatccattcttataggcgcatcggtggcccgggcttcgctggataggcatcatggaattccttgatcatctccggagcattcttaaagttacctactgggtaccatacgggatctaggtcgtatcctaaccactgtacgcggtactgcagcttcctataatgctttcttacatctaggatcttttcaacttcccacttatcagtctgccctacctatatcggaggtagcggatccgtgtgttatcctgtaagtggttctatactcgctgccttccgcagcttacttaggttaaacactaggtagacgttaattgactgtggcaggtctaacttatatgcgttcccaaccttttcgatgatcttatagggtccactagtggtataagagagttttcgactcggacagtcctatagccaatccttcgtagtaataaaaaccaggtcgccaataccgaagtcctcttcgcgacgataacggttagcctattgtacctatagttcctatgactttacaatctattcacatatatcttcccagatctgttataactttaagagtcgatccgccgcttcttattcgttatacatcagtcctatacggtcccaattaaaagacattgctagtttataaccccgttcaacaaagaaaggggacctctttgttatatcttacagaagaattgatactacgaaatctactattagtaggtattctaaccagttgtcctagttgtattcaatatacagtctcaatcgctacactataaactgatttacaatttcgctctagccgtctgtctataggtagtatataatagacagtttccgcttaatccctaggattctatagaactctgtctaaaactcagagataaactatccccctcggtccgatacaatggtttcagggatccctataatccgtataacgttatctataaatagacgcgctatctgctttacattagtatctttataataggggattgatatcggtctcttacttagtcgattaataataacaaatactatattatagccgtatctgtcctttaggaaggaacagaaatccatcgataaatgctactatagtcgtttaggaatcggtaataggtataggagactaggcgtgcgatctctctaggtctttatacgtttatatactagacagttgtctatataccgctttatatctgtaacctatcctagctaatggtatcttattgtaataagcttcttaagtttctcgattctagggtatatagttaacggttatcggtatatcttatcgagtaactatgcttaaagatccccttcgtcggggacttcgagatagtcttcaaatagcagtaatctgtcttacactacctaacggggatctgtttcctatcttacagtctaacggaatacttctagcttaaggctttagcggttcgctaactagactcattcggttatatctaagttctatatagtcttaactagtagagggggggcctctgtatcccatatagattctatctataatagggatatctcgatttctaatatcgattttatttcttctccgaaatattccttagggagtaacgtaaggtaccgactgacatctatataagggctttccttctttaaaagaacgtctacaataatattccatttcctaggacagtatttaatcacaaagtagaactataagaggaacttactctaccgtacttattattaattcatctatcgtactattataaaatatttgagagactaataatctataaggatctcgaaacgttctatacaagagagcccttcaagttctagtcgccattcttagagtatacgaatgatcgtaaggagttccttatccctgattttataattaagctctacaggttatatagtctttaagaagaaggcaataggataccaaaaatcatcggcttcgtgatattataagaggatagcaccaatgactccatttaaggcatccgtttctatataggtctagaggtcgggattgtaataccataggataggtacagttatcaacttatactttaattatataaatacttacttacagtccagcgaccattcgtacactatatcatactatataagacgatataacggtttcgaaaggaaactataatccttaataaatcatcgatagaagttacagaatcctaagaaggactatattcccttaatcgttaacagtgtcttccagttcctaataactgcgatcttctctagatctactacaataccgtcggtactcacaataaatcctaagaacttagttttctatacagagaattcacacttagatagtgtaacctataatcctactctttatagttattcgaggacttctctaacatacttcttatattcttcgagtatcttgctatagatcataatattatccacaaatacaactatatagtcgtctatacagtctccgagtactatattcataaatcgctggaatattataagaccgtttataaggctaaacggagtcactttatacttaaacgatctatattaggtacagaatatcataagatcttctatagctagcgttaacctaatatagtggaaaccttggcagatatcaagctttataaagaattttgctttactcgttcgttagagtactttatcgataagaggtaataggtaacaatctttccttataattatattcaatcttcggaagtctatatagaaacgtagaccactacctagcttcttcactattaagattagtaaagcatacagagccgaactaggaataataaatcctttctcaagattatcgagaatatactattttacagcttttagtttatctaacaataatttatagagtaggcagtatcctagctatacttctacttcgaggataatattatagtctacccctaggcgatacagtagtagtttattggattttttcttagagaatacttctataaaattgtagtactcccgcgggagggtccttttaatcttatcgagttctatatccttctcaattgtagatttaatatcaataatctaatcaatttcacagagtaaggtctaaaagacttcgacatctttattaataaccatttgtattcgtaaacggttaaatcctacctaaccgataatactaatatctattagtagaagaacttcctttatttcttcctctagtatctccgttcaaagaggtactagttcgatttcgtcgttaaggttccattctatcttacactactctataacttgccagtacctatattaatactctcttataacagggtatagcttctaagtctttaggtcctaccgcagattacttaaggcttatttttcgaagaggcgatcgcatcgttctatatccttctagtgatccggcttaatttatacagaccacttaaggatcattataggtacgggtacagttaactagcctactaccttatcaaaaagggtattcttatctagccagattatacgataccgtcggcagttaaggaggatatcgttctccgcgaaccacatatatccgataatcatattatatcggcctagatctactactagtataggaatctactactagattcgatcgtctatacttagcgtaagaacgacagtgtatataataggtcgtaataatttactatcgaatcccctaactaggcactcgcggtctagtttataggtatataacccaaatttcttactaagtagtataaccagttctatattaataaatattaaactatctactctagtatctactagcgctaagattataaaggaatatctattataagtcagtcttatattaaatactaagctatctcgtagacctcctaaaagcttatatagatctagtgtatacagtgacacctattttctacttaggattaagacttctcctaggctcctacttttcctaggtctacgttatcctccaattcttcgagttcggttacacgcgattagttgtaggtctagttagtcgcagtaacagcgcttacagctatatttatcttcttcttcgggcactcgaatattatataccccttttccttacaataaaagcatcgaccctcctttataagagtctctcactctatggctaatagtccagataataaggcagtcccttcacgttttatatacagggtaaaactagactagttagcagtagtcccaactccgcttctaaacacagttattatataggtacatacggtaccctttacttcctattagagactaatcttataggacatactttagtaactctaggtaaaggtatcgaaaggaaccgtttcctaattaatagcctatataacttaactctgcaatagatatagaagtttcgaatataggttacacttacggttttctttaataaccgcggcttcttccgtaagctacataaatttagctaagaagtcagtaaagtcttccttaggttttatcttaagtttataataggccgtatacacttctgtacaacgatttaggttcgcaaagacagtacagaggtagacaataatatcttctgtatcggcgtatagattatttaaggtcacacttattcttaaggcaatatacagctatactttgcctttatatcggctttacacatatagtttccggtagactagtaacaggtaatagtcggcatttgctttaagcttctatctaataactatctcctatatttcgaaacggacttcctttctatcctttaacattagtatatcgggtatcttcatagacttctaactaatgactcctataatcggtatatcacttcgggcttagttcgtttcgctctaagtaagaacaaggcgataggcaaggtcgtcacacttacgtatagcgatatctctataggcggcagccttatcacgttcttcggtagcttggttacattctatcataagacaatctttctctatatagagtcgatcacattcttctataatttatctaacagcttcctcagacctcccgttctctaagatcaagacctagatttcgttatatatcatctggttatcatcttcgactatttggaaccgattagccagctcaaggaattgttccttactaggagtcgtgtatataatcttatagatagaaggagtcgaaggaccctcctcagggctatcgcattcaatattctcaattagatcctatatttcagtaggagtcggggttttagggttagcagcttcttttgtgagacaatccggtactacgggttgttttcccttaccgattgcggcgatccgttgtggtaggactatgactggtcctgttctggttggttttaggatgggtggggtgaaaccagactaggacaaatcgtaatgattatctgtgcagtcgtacggcttcagaagtttgggtttgggatgatacttgatattatattgcgtgccagattccttttaacaaaagaagtgcatttctaatcgaatatcaagtatggaaaaggaaaagaaaagaaacaaacgtgaaaataacaaatgggcttttatacccctttagggacaaagccctattctcgtttcccctagaaggaaggtacgactgcctgcgcaaacgaccaacagtataatcctaaacgggaaagtacgagtcctataagtgctaattgtaatataacccctaggtaagaatacatttagtccctaaatactagcttctcgttatccacatggttgtctaatatccgattatcttacgcggcctcaatctattcttataggcgtatcggcggcctaggcttcgctagataggtattatagaattccttaatcatctccggagcattcttaaagttacctactaggtactatacgggatctaggttatatcctaaccactatatacagtactgcagcttcctataatactttcttatatctaggatctttttaacttcctacttattagtctaccctacctatattagaggtagtagatctatatattatcttataagtagttctatacttactaccttttatagcttacttaattaattgtgacattcaatccagtctgaagcaagttcgtatgccgatgtcccggcttatgcaattgaaaaagatacgtctatgctataagaaacgttgcgattcgcccgggaaaggctcaatgtgctctaccatccgctgatcgagcccactctttttccctgaatataggagccaagactgcgtcaattgttctgtgtggggcagggccatacgaagaggggggagattcggaaaatcgcaggtccttcaattaaatgagcaattacaaatagccgagttcgtaggctgtagcattgggcagctatagcttcacgtagtagcattcttcaaccgagataactccacgtaagctgctcaacatcccaaattgttgcgtgcttgtgtcgctattggcttcaaaaggacagtttgctgatctgtcgggtggacacgaagatcttgatattaggatctgacgctgatctcaggtttagcctcggccctgtctcattaccggctcgggttggctcatacaagaggagaccattttggatcaagttattgagactgcttaagaaattccgatttagcaagacagcggtacaatagaattagaattcgaaatcgaaaacagattaagacactcacgctttctttcccagcgccccactccaatcgtactaaactgaattcgaccagggaaagtatgtatttctggtggatcgtcaaagaaaggtaatactagtaactaaggcgaaagtgggagctatgttaattctgataactagttgcacactaaagtattccacaagcgagtggccacccccaaatactatagtaaatgcgatatattctacatttatatctaaacagccgtatgtttatcctatctccccattttccgatagttataatatatcgtatttactatggtctttggggatggccactcgcttgtaaaataagttagctcgacccatcggcgcctaatcggaagctcaaaccagaagtactgtactcttttggaaactgtctaaagaaaatgccacagcaaaagaacaagcggtctacggagtacgaagtttcagctggccacgaacagtggggccactttgtagtagctcatggcgtcccgaacccgcacgcaacaacgcaacattatctggttaaagattctgattagtcgccggtcgagttatttcccggctagcctgatcaactgaataatggggtttcggttagtgtagtgagtctacgctgtagctggctcagcccgctacataaatatgagaccgaatctctcacatatgaactagatacagcttttcgcgctttccttttataaatcgatagtcaattctaccacaaggaaaatgaagatttgtttgattaattcgtcatacgaaggagttgactcccctttcgagaaggtatgtctaccctattgaggccttctcccagcatctctaacttcaaaacagtatgatgactttcccgaccctaatcggtatattccaaaagaccggcatgagtttttcactcgttacgtcaccaagagaaatgctgaggcggagattgacgagatttgcaaagaacattttgatatgttcatgaattacatggtgaatcccgacttttagatgccctctattcctggactatacttacagatctctttttcagtggggcatcgaaaccgacgatgtggcaggagttgaagccaccagatacctcgaaaccaagggtgttcccatcctcaccaacccatcgacatttctagcaaagaataaagtcgatctccagagggccgctgagaaaacaggtctccgtgttcccgaaaacaccccagggaaataccccaaaattgtcaagtactctgacggatatggttcgttgagtctggatgaggcatcaatctgctacacggagaaagaagtgacggatcgcgtggcccttttgcaggagaaagaaacaccctttggcatcatcgtccaggattatatcatcggccgggaatgttctgctatagttgtggaaatgggaaaggaggtggtggcattgacaccgctgcaatatgtctttccgaaagacactcccgacaacgaagccttcttgacgtggtataacaaattcgaagctgttgataaaggcaccatcaaatatgcatttgtggaagagcagcctcacatcaaaaacctccagaatgcggctgtggacgcattcaaagcaattggtgtcagcggtggtggtgggtgggcccgtgttgatatgcgtctggaggaaagaaccgggcttgtctacgtgattgaagtcaattgtatccccgtggtcttttacccaaagggaaacacacttggtgatgaccttgttgtgggagagagatttcctggtggccaggctgcattttttgacatgttactagcgaccaagcagatgcagcttgggtggcaccgtgttcaaaatgctcatgtcgccgaggtttacaacaaatttgccccctcgtaccattccgtgtggagcaattcggagctctctgagatgcaaaagtaccttactaccaattgggactattcgggtacagttcttgatgttgcatgtgggactggtggatttgggcagtttctccatgctcaagggatccaagccgaggtgactggcattgacctatcacccggcatgttggaaaacgtggaacattacagggaacttcgagttgggccaatggaggagcagatcatggtatgtgcctttggaatacttgttttgggaaaaatgaatgaagacaaagcttactttaatattagggtgctggtgaatatgaccatatcgtatgctttggtgccctccatttccttggtcctgtctacctcaatgctgtgctcgcacggatgtttatgcttgcacgcaaatcggtttcgatctcggtagacgacgtcagcgacgaatatatccaggcaatcaaagagaagcatggtgaattgacgtttaatgccaatcatgtcaaggccattgaagagttcggaattccaaaaggatggaaacgagtctatcacgagaggaggcttatgtattcttctccaaccaatggagagaaggtttatggatatgggatgcgctttgagagagcagatgcctagtatttcgatggcttttcaaaacctgcgtgttgacataatcccaatttcacaaactttgacatcattgaaagcatctgccctatagtcaagaattatgccaatatcaaatcttatatctaaatcgagcctcgaaacaaggggttgctgtcaagtagcttggcagaatggtaagtataatttcgaccttgggagtcctggacattttgctgctgttgcttgcttccatttttcggccacttcacatggctaggattaatagctagagatagcctgcctttgctatttctacgtgtatgacggatttccttgcacttcttggctttccttttccgttttagtcctcaggccttgccgcttttgccctcaccgattaaaaccaagcacgacccttgattatataggctcactgatctccgagggctgcaattgagcacacatgtacttcgtacctgaaacatcgcctgatttgatataattttgaggtgcctcggctcggatcttccttcttgtcaagtttggccatctttctggttgggctcggtaatgatctgcagtgctcaatggcaacattgaaaaggatatagagacaacattgctcgaattgccattaataaacaatcgatggtccataggaccgaccactactgacattgcaaagcccctgaaaatgcattcatgattaccccgtaaatagtagaaaaataataaagggctgtgcgttggccgatcctgacagttcttgctccggtgccggcattgtcccctggcatatatatctagcttcattttccgctacgtgatgctttttgctgcggaattgacgaccaaggcctcgttcagatccagttcaggagcttgagcttgccactcctgctctgacgcctcggtaatcgttcttatgacctttgttttggtatttaaagaccacagatcagcttttcagactcaacccgtgagcatttgcctcagtgaaagctggagctgaaggatatgcttgagtgagggtggctcggagctgaaaagggcgccatgattttgccctgatgaacagatgacagttgggatctatgcttgcagttcagtatgagacacaagaaggagtggacatgggatcagcccgagtggatgcctaatgagcgggaagtagctatgtttctgagcctaggccgtactttgtacatcccatgattgctgtggagacttctacagatacagaggatacatctgattcgctatcctggttgatgataccaactgtagatttagggttactccgctcggtgggccgatgcttcatacttcatgtctggttcgtcatatacgcacatcgcttctacatttacatagcagctatataattatatgacagtggaattgttttatttgtcttcgtccttggctatagacaaagtctccgatagctacaccccgggctatttaccgataagtgcccagctagctattaaagcaaagagatgaagcaatagacgtgaggtcagtgtccagaatggccggcgtggcaccagtatccgtctgctgccgaccggaaatgtagtgcaagccgttgaaaatactcgcggagctccttttcaatgttatcctaggataacccagcaggcagcggcgaggcaagaagagaaaagagcaaaagttcggcaaacatgatgaagcataagaactagaagaaagaaagaaagaaagagagaatgatagatatgataatactacagacaacaggtctctctctaataggtttaaatgtcgctgaactgtacggagtagttactctcctatgaaagataaatgcttggaatcaaaatgagactacaatgcaacctactacgacatatactcgggtttcttcattaatctgatgcatagaatacccccaagatgcaatatcgttcgctacacccttaaaccgacttcatcttagcattttaaaaagactaacaacatacctggtacattcggtattgacccatttgggtaaagattgtccggataattattacctagataggcataatcgaggcggattgccctttcgggtttgggcgccgcacggttaaaagctaaaatcatattttgtacaacggaactcaaatacgtacgctcgcctggaaatcaacggcggcgagatttctcttgttgtcacccttcggtaactagagtggtgtgtgctttttcatgccggacctaccgaaggatcaaggatcacccgactggcttcgtggactggttgcagataaagtgccttgccaggtagtgatgtgaatactgagcgaacatatgcaattggaacgctggagcatacatagctgtgcgcattcgtggaccttaatcgcggtctataggaatgttgatatagatcatcactggaactacgcgttcaattgcgttgatacgactattagtggggttgctacaaatccaccttctcccgcttgtccatatacacgccttgtacaacggcccctcgaaaacgacatgatctatgattctgatcgttggacaaggagatcagctcccggaactatctatgagcaacgtcatcgatgcctgaggccataatatacacgtggtcgtaaagtacattcaaagttatcccaaatttagcttgtttcaccttagtggagaggttattgccatgggaatatacgcatggtatggagcagaatcgtcagatgatgtacatggaggactatccgggatctagatccttgtactccgtattcgtggcagtttagttggctacgtgggacaggacactgaaggtatctgatacctgacttgatacccaaatctggcggggaagggctgtacccagtacccactgtaattttgatgcaacgggccccatgatgagatgagatggaaattaaaagcacaggcgtagataagtaagattaagcgaaaagcacttcataaaacccagaactacaaagtcatctatactcatagatcgtgcagttcattcttatctggtggttttgatccccgcggtgattacatacgtgtttccgcccctgcttctacagggctcgtggccatcagggatcggtaatcgatcagcacagcttcccccgaagcggaacctttctttcttctctcttcaactgctttctcgacggacagatgttgagtcgccattcccgtctctctctctccgtgcgtgtgcctagagtctgctcattttgactcaactccactcaccccatttcttcatcttcccctccccaaacccacagggaggttcggatttctctctttcttcgtcattccctcgggattgaaggtatgctctatcaagggctctgacttctggtctagtagcttctataaatcctcctgaccagatcctccaactccgtctgtcgcatcccggtgaaggcggcctgcttcacgggtacacacatcatcgggactgctggtgatgcaagcgggtgaacctcatggctaataaattctctattcatacagcgctagaccgcttcaattttcaatcgactttttctccatctccagtcatttatcggccgtgacggtcgagagcgtaccccacccgacctgcgcgacctggtctgtgttctgtgtgtggacaccacgcttgcttgccgctgtatcggcctgtcgcgcaacctctcctgggcacccgatctttcgaccaacccttgtaccatagactgctccgttacgacatctcggagacgaacgaaacgaatccatcttatgaattatttccctcgggtatatactccatcatgttttggcgctttgggggatatgcgaatctttccaccatcgataccctgctcgacaaacccgatctcactcttgaggaactcttagacgagcccgaaactattcaagaactgaaacagcttaatacgaaactcattgaatatctgcgcgaggatcatgccttgaaacggcttatggaatacgtcacggcaccgagcttggtgaatgacgacgaagatgatgcgaaagacacttcagagaagggcaaggatgatgccgcttctgcggagcagacagatatggacgaggagaaggaaggggatctgagggatattcttgacccggatgacctagacaaagtcgaaaagaagcgtctgacgcatgcctatatcgcctgtgagattctctcatcagagacatggtccatcctcgaatccatgatggccaaccctgcatacttgggcgaattctggggtttcctgcgacgacctcctcctcttgattcattgcaggcaagctacttcacgaaagtaaacgagactttgcttgataaaaagaccgacgagatgctggagtttctcaacacccttgatggaattgtcccagcattgttgcagcatgttgataacccgatggtcatggatcttctcttgaaaattatcagtcttgagaaggcagagggtggccagggcactgttgactggctcagatcccagggtttgatccccaatcttctgtctttcttgtcccccgatcgtccggcgtccgttcaaacctctgcaggtgacttcctgaaagcgatcatcactatatctgcaaacgcaagcccgaacgaccagtcatgtattggtcctaacagtttgacacgccagcttgtctccaccgagtgcgtacagcagctcatcgatgcgatgctcaagggtggcaatcccctgactgtgggcgtgggtattgtcatcgaggtaattcgcaagaacaattccgactatgatccggagtcccttggcggacccgatacaatgctcaccacttacgacccaatctaccttggaacgttgctgcgtctcttcgctaaacatattccccagttcatggctctcattcaaagttcccagcacactattcatgagggaaataagctcaagactgttgagcgaggaaagttgaactctgcttggggtgggcaaattgagcctcttggtttcgaccgattcaagacgtgtgaattaatggcggagctgcttcattgcagtaatatgggtcttctgaatgaaccaggcagcgacgagtatgttaggcaacgagacgaggagcgtgagcggttaatccgtgaaggagggttcgatacgcgaggcttcgatacacaccaagatgagcattctggagttgataccgcggccgattttgcgaacgattcagccctcgattctggatccccagaagatgccaaggtcacagaagtgccacacgtgggtgaagatgacggatttgaagatgttggcgcatctggtgatttagtgagtgcaaaagctgatgccgacacaacggctactgcaaactcgcagccgacggaaacggtcagcgaaacctctccatcggaaatcacagagccagagccggtgtcttccgaagaaaccacggataaatctgaaagttccaccacacccattgatccctcgtcgcctactactggtctctctgatcaagtcagcgccatgaatcttgaaagtgaaccacaagacgagcagcaggagcctggaaaggacaaccaggagcctgtggcttccctctcccaagatgttccagctcctctcttctccaaggaacaagcatccgagtcagactccgccccagccgatcaatcggaagaaccatctagtcttattgaacaggtcgaggaaacgagcgttccgaacgacggaggcgatgaggactcggccgaacaatacatccaactcgatactgacgggcgacctgtggtcggcgattacctgaagatccagttcgtggagaataaagttgtcccaacgattctggtttgtatttcttttagagaacgttgaacacccacgctaaccattgatagggcttcttcttccgcttcccatggaataacttcctgcacaatgttgtttacgatgtgattcaacaagtctttaatgggcccatggagcgtggctacaatcgggcactcgcagtcgatgtatttgacaccggacgaatcactaccgcgattgttgaagggcagaagcgcagcgatgagacccagcggactaagcaaatccgtctcggatatatgggacaccttactcttgttgcggaggaggtcgtcaagttcagcgagcgtcatccgccagagttactctcacggtccgttatggagagcgtgttgaatcccgactggattgagtacgtcgaacaaactttatcagagactcgcgaacgcgacaatgctattctcggcggtgttcgtcctgatatatcggttgggcctcgccagactagccttaacaacaccaactctggccaaggcttctctaactccgctctggcggacgtgggattgaatggaggaatcggtggctcaaccttccagagtttcgacctcggccaaggaggtgtttccggtggagcattcggcggaggtggcacctcccttttgagtggctttgccagctcaagcgacgacgaggacgaagaaatggaggaccaggacgagagagactccggcaatgccgatcaaaatgacaatgacaatgtgggttacctcttccgatggacatgatggtgcacgatctcaaccgattccgtgcatcccccattatcttcaccattccttcccggtttacccctcatgtatcccaagctatagcaagggccaaagagccagaattccaggtaaagtgctggatcgctagtgcttgggcaatgtgggcttgactaaaactggtatcatgcctgttagctgatgttcattgccgatatcgtgttgcaaatctcagcccaggggaggggggattctcgtgtcactttgtcctgaactgggtttcttatgcacttttccctttccctttacaaggaatgggctgtcagatgtattgtctttttactaactgactttctattaaggtgttcacaagttcagccagtcaacctattcctatcttacccccgccacctgctccattgagcttgggcccttcccgcgcacgccgtcagttagccgcacgtcttgccgctcaaaagcaacaaccatcagaaaatgaaggcgacggagattacaggggggccgaaggaagtgaggaccgagagtcagattggccggataacccattcgtaattgcagggatcgatgaccccgccgacgcaggcagctctgcgttccctaatagtgactttggttcagccgatggcaaacactcacctaccttcccggaatcaggattcagccctccagactcgctatcaactaactcatctgaagatgaaggtgatggccacgcagaatccgtgaggcgacaggttcgtgtccctctagaagtcgaggatgacgacgatgatgaaatgggtgagatggtcgggccgagtggcattggcatgatggactccgacgacgaagacgaggctatcataaacgaatctcttggttactccaacctctcgggccccgcccgatacaacaacttccgatcacgagccgtgagctcccattatgatgatgagcaaaacgacagcagtgatggcgaagatgatggattggtggagataatggtccctggccgcaaggcctcgacctcgaactaagcctgggctctttgcatttgatttcgtggccatgacggtaaatcccaacggcaaaaaccgtgggggcgagtcaccgttgcggcatggcgtttgtatatagactttccatcgatggagtagccatggggttctgcatggagagctttctgatctgatgtcttatttgtgtccttgcatgtattcgcatgctacgtgcctgggatcggcttacgagtctgtggcttttgattggtattcgcttgtgtacgatagttgtctggagaagcgaattgatttattttgagcaaatagtaggaaagcctatatcagcccgaaagtatcatttcgtagatcattcttataagacgcgcaaaaaagaacgttgaatctctcggagaaaaaagcgggcccccaccatcccgcatcaattcttctcaggactttgacacaaccaagtcggttcattcttggataactttgtcggtagcaatcagtcgtgcctgtgagaaaatatatccaacaaaaaaaaaagatacacttgcttcaaaaatggcagcttcctcggagtaagtgcagtctggagatacgtcattcccaagcgtatatctaacacaaaacagacaagtcgatccaagtttaaaagctcacacagagctagtgaactggttcatccagcatggtggcacggtcgataagagcgtgcgcattgcacaagacgcctcgcgcggcgtgcacctgcaagtgagagcagactggccagaagccatccgaaaagagacccgagtgatcaacaccccaattagcgtgtcaatgtcctggtacaatgcaattggctatgagtcaccacggggctcattccccaaacacggcgttgactttccgcggacatggatcgacgacgtcgggccggaggagacttttgccttcttcctcatgggccagtatctacgcgggcccgacagtttttggtatccgtatcttcgtaccctgcctcagccgggtcaattgactaccccgttgttctttggtgaggaggatgtagattggattcagggtactgggattcccgaggctgccgttgagaggattaagatatgggagcagaagtatgattcgggctatcttcagttggatgcaatcgaattcccggattgtgagcagtatacgtggtgagtacgagatactgctgtctctgttattctgcccgaggatgacattatgctgatttgtatacagggagctgtatctctgggcttcgactatcattacctcccgggcattctcgtcaaaggttctatctggggctgtcgagcctggtgatcttccagaggatggagtctcggcgctgcttccgctcattgaccttccgaatcatcgaccaatggcgaaggttgagtggcgagcgggtgacgaggatattggtcttcttgtgcttgaagatcactcggcaggccaagaaatttccaacaattatggccctcgtaataatgaacaatgtacgtatcccatttgccggggcgtgatatccgagccttgagaacgcctgaatcatcatagacactgaccatatgatagtgttgatcaactatggattctgcattgccggcaacccaaccgattatcgcattgttcatctgggcgtgaagcccgacagcccgctcggcgaagccaaggctcgccagctcgaactgttccctcaggttgccaagaatatcgaggaccactattacatcttcaatactttctacccactactggctcccgaaacaacgatggagcactcgatcttttcaccggcattgttcaatgcattgaccgtcatggaatcaaacaaacgcgagcgcaaatcactcgagatcaccgagagctgtattcgcattcttccgggatatggaaacaaccatagtatctatgctgcactcgctcagattagcttcgagctcatggctcatgccgcaaacctgaaagccagtgcggagcatctgcctttgcagccaaccaccctgaaccagatccactctcagatctaccgcaacggccagataacattagaccaggctgctttggttatcgctacttggactattgcacgcgggagggaacataagcgtggtgaaagttgggaagataccaaggtcctcctacatgaagtaatggcacgcgtcccggccggccttctctcagacgaagtcatgtcccggatccgagtgcgtatcctagaacgtccgtccctgatcactaaaaatggtgaactgttcaggttaggcgaacttttcagccttctgccggctgaaatgcaggagccggctcagacatgcttccagcacgccctgggagaggctagccaggccgttccgagtatatccacagatccacagaccctgtttgcaacggttatttgcttgctggttgcaacgtataattcgccagaggcacggtcaagattgtcctcgcgtctcaaccgatggtttactttcctgctcgagcaataccctctgccttccagatctattgagactggtgtggatgaagccagcgaaacacttcgtcaattccaaagatatactacggcagcacaaccaagctcatgggcacctggtgatggggttaattggcttactgaggacagcgggtggttggactcggagtggcttcaatggtcatggacggtggcgggctcagaaatggtgatgattcctcttgatccatttgagatcctcaagatggagggatcattgtctatgttgaaacaggcatgtctctatgtaccacaagagtagataaagaggaagtagacatagaaatgagcgagtcgtttatggtcttcgttaacaatcctctctcttaaccccgataaatcgagaagaagaaaaaaagttagaatagacgttcaagaggaatttcgaacaaatgctagagaaataggctatttaactggccatatctttatgtatatggatcacgtgatatggcatagttataccatcctaatgtggaattctgactcagcaatattgtcacgtgtgagcatatcacccaatcatatcgagcccaaaggcggatcattcagcaagcgcaggaattgccgtgagctccacgactcccttcccttctactccacgaccctttgaccctcactacgcattgtcacccccgccgtcatcatgatatccagagcggcggctccctccacctcctccctctcccacctctcgatccgctccctccgcgctccgggggcggcagcccgctccttcgcatctgtgtcggaggcgcctcccgtgaagcaccatggcggacttaaagaccacgatcggatcttcaccaacctttacgaacatcatggaacggatttgaagtcatcaatgaaatatggtgattggtaccgcaccaaggatattattttgaagggtgatgattgggtgggttgtcgcacaattgacgatctggggaattaccaattgctaatcccatgaccagctcatctcagagatcaaggcatccggcctccgtggccgtggtggtgctggtttcccctcaggattgaaatacgtaagtggcccacacgcaattcggacaaataccagtgctttaggataaccgaactgactcgctactcgatagtcgttcatgaacttcaagggttgggaaaaggaccctcgcccccgttatttggttgtcaacgcagatgagggtgagcccggtacttgcaaggaccgagagatcatgcgcaaggacccccagaagctgatcgaaggttgcttggtggtgggtcgtgctatgaacgccaacgccgcctacatctacgtccgtggcgagttctatcacgaagctaccattctccagcgggctatcaacgaggcctacgcggctggtctgatcggtaagaacgcctgtggcactggatacgacttcgacgtgtacattcaccgaggaatgggcgcctacgtttgtggcgaggagacctcgctcattgagtctattgaaggcaaggctggcaagccccgtctcaagcctcccttccccgccgcagtcggtctgttcggttgccccagcacagtcaccaatgtcgagaccgttgctgtgacaccgaccatcatgcgccgtggtgccagctggttctcttccttcggccgtgagcgtaaccacggtaccaagcttttctgtatctccggtcacgtcaacaaccccgtcacagtagaggaggagatgtccatcccgctgcgcgagctaatcgagaagcactgtggaggtgtccgcggtggctgggacaacttgctcgccattatccccggtggctcgtcaactcccatcatccccaagtccgtggccgacaaccagctcatggacttcgactccctcaaggactcccagaccggtctgggtacagctgccgtcattgtcatggacaagtccacggatgtcgtccgcgccatctcccgcctgtctaaattctacagacacgagtcttgcggtcagtgcaccccctgccgtgagggcagcaaatggaccatgcagatgatgcagcgtctcgagaccggcaatgcccgcgagcgcgaaatcgacatgcttcaggagctcaccaagcaggttgagggccacaccatctgcgctctgggtgaagctttcgcctggcccatccagggtctgattcgccacttccgtcccgagctggaggcccgtatccgccagtacgagaaggagcttggcggtgctcccttcgccggtggctggcaccccgacagccgtgctgagggcaagttgatctcccctggcatgtaaacgcacctcccacctttcgtttttccatttacaaccccttttctccctgtgttgtcccctcaaaaagaagcaggaacaggtcgaggatgattatcgcttctagatccctcttatatctccctctccctggccggtaatgttttctgtctgtctggtccagccggggagggtggcgtttctcttttctttactcagcccgatcccctcgtattcatctatcgcgcctaggtttcctttattgtacagttggtagcaaatttgatgcatttgatgtcttcattcgttttatgtatggcgggttttgggtccatcgtgccaactggatttctggccagaaggttaaccatctgccatgaatcaacattgatatatctgtagtctctcaaaggcctagaaggagaatagataagagcggaagaggatctaactaatcgacgctagaagtcctagatattgcaaggtaacaatcttgattcttgataatagtcactatatcgcagccttcttactaccctcactagccataagatagtgtgttacgctgtcaagctactatatctgagaaatgtcgaagtccatttcgatgctccgacaagaacgaatcaacgtttctcttctcacttcatccaactaaccgttgagcaagcacttgacaaggccattcgcctttcacattcacagtctcgaatctctcaaacccttgagactcatagtactggatcaattttccatcgccacccgcatagcaatctacccgtagtaaagagaccccagccttcctagcaagatcacgcgcatggtccaagagacgtctaccaatctgactgccagcacattgccgatccgtgactaataaccgcacgtaaagctcaggctcagagacaggtgtcacatagggcattttatccccaagagcgagcgcaccgacgacgacccccggctcttctccgttcatagtttgggcgagccaaagaccatggccggttgttgcaaattctttgagttgctcggcgcgttgtgggttctcggaaaaggatgctgttccccattgcccggttctgttgtgcgatactagccattggactgcggtgtctagaagatggaggactgccgggacggcgtctgctgttccccgcacgatagttatgtcgtggactccattcttaatcgggcttttgagatttttgttagtatctgtgagtggcctttcgcttttgttcttcatttgatattggccccttccgatctacctcttctcgggtaggttggcgctttgaacaataatacttactttgatgccattatccaagcagtctgaagggacgattgttgtaaaatagcctcaataagctcaactagttgaacttttggggggatctttggaaattgtcgagtgagaagtcctactgtacatcctggagcggagataggtaaataaaggcttggcaatgacgtaatctcactgtgcattcatgcaatcgcaggaatgtggagatatgccgcgagcgatgtagcatatccccattttctccatttccatcaagcgattaataggcgaatcaattcagtaacaacatagtctctcacctcggaatatcagagcgatgatctcccgtcttccgcttcactccgttcttctaggttcttcagcgacattagcatcattagcaccagcaaccaattcctgaacattagtatccttctgttctctcccatcggcctttccttcgatctgaatctcagcagctctcgcatccttctccatcttctgttcgatcttgagcaacctcttctctctccagcccatcccatacacattctcaacccagagcagccccattccagcagtcatggccaagcccaagaaaaagaaacaccatccccatcccatgccacttagcatttggctaatgaccgcggcaccaacagcgccaaggcagcagcgaacaaggttgcatgccgatgcagctgtggcaggcttgtctgggaataggtcgacaagaagggtgttgaggcagttcagggccgcaacgaagcagaatcctataatgaattgcagcaccagtggagcggctaagtgtactctttgctgcagcacccacccgtacgggatgaatgctacaacgccgatggccattgcggggaatactgtttgcaggcgagtgtgctcgatcggaaaactgcgcaaatcgtcccctttctggcggttcactggaaatccgagcttttgggctgtccgcttgtagttgtagtcaatgacttttccatacaggactgcgccgaggcaagagcttaccccgaggggcctgcgagtttgttagtatggaccccggggtcaggaagatgaggcagacatgaagacttacaagaaacagagcccaatctggagctcgctgaatccatacaggggaccaaagagattaggagtgcttgttaacagagcgatattcgcgaacatcacaatcccgacgtacgagatgatgatcaaggcatcccactccagtagaatgacaaaggagctgagaggattcgggaacctaagtctcttagtatgcgaggactgttgttgcgacccttctgcatcagtttgcctttcctcagactgtgtctgcctcttcgaccaccattggataaccgacctgcgccaccactcgttcggtactgcacggccgtcaccaacaattttgcgtgccgtctccggcatagtaagcacatagaacaccaagtaccctccactaacaatgaccaggaaccagaagacactgcgccagccgaggaatttggccaaaagaccaccgataacagggcccagcgcaggcgcaaccataacacctgcagccataggcccgatatatttcccacgctctgctgttgtcgtaatgtccgctataacaccatatccaaaggccacggtgccgctgctccctgcgctctggagacagcggaggacaatcaacgccgcgaaactgttttgtaacgccagtccgatgttagcagcggtgtacactgcgaacgcaatgacatatgctggacgtctacccccggtgtcggcgaatgtgcccatgaagctcgggactaggccttggaagatcatatatgttgtgactgtcaggttgatcagctcgggtgtaaggtggtaattccgtaccaatgttggcatgaccgggtagtagatttgaccggaaagtggggagaagaacgacgcaagagtcaccatcatcacgatgaatgacctttcgtatttgctgaatgccgaaaatgatggctgggaattgtccggtgctgtttctgtgctctcgatatgtggctcggtagctggcgagcctgagtcttcgggttgaatatggtcgttgttggcatcgctgggggatgtatgtgtggttggggctgcgacgggtgcttcatcaaacccgccatatccactatcgactcgccttatattgcgatctaccggggtgtgctggaagggaccaggtactgtcactgtctttccctcgcgagttccttcagtcaggtgcagctccatgatgaatagtgtgtaataagccggatagaatgataacaggtggatatgagagaggtagagaggagagaagcagcaaagtaccgaattatactccgtgactctttcttgagtcgtactttccccaaagtgtcgcacaactacgttctatggtttattgcaacccattcggaacggagtagctaggcttcttttatactatccaaatttatgtatcactttgcaaggtgtacggaactatttagcatcccagagaaagtctagcactaaataaaaaccactttgttatcatctttatcggtcttttttgaggtcttttccacggtcctttagaatgaataattaccccctggtattatagcacttatttttgtcacaaatgtaccaccgacctcattgacttgcgaaactccatgctcggggatcctacttctgggtgccctaatagaaatatgcagtacgatagaacaggtgtaatttcacagatagttatgtaattctctaagtcattaaaataatgcaaatacaattgaataataacaacattcacttttgagaggttcgatcgcgagtacgaggtgcctatgcgccactgttgtgatatgaggctggtgcagatcagaaatcaagccacaccatcggaataaattcccacattgcctatgttgtatacgaagaaccaaaatcgaaaattaacttgatctactcgttgtatatataagcttagttattggagtctaggttgtgcttcagtgtactcatgtatagcatcattcatgtctaatacgagagattaagggaaccggacttgtgcactagcaagggggatagaatacagatgagacagatagtaaaaagagcagaacaaaagaaaaagatcagtgcttgggcgttagatagttagtgcccgctaatttcacaatgaacataggcaaactaggacattattctccttatttcctcaagacttaataaccaccagccatgatgacgccgtagtatcgacggctcatctctgcggtctgcaaaacgcgagcgtcacctgtcaagggcaggcccaggacagcggaagattcaacggactgtaaaaagacggaagtcagtaatgaacgaaagcaatatatcagcggaaaggagggagggaactaacatgaacatcttcgtgtgtaatccagccggcgacagcccggctcatctccttgaatgcaacacgctcctccagtccttccagactggatccctggacacgatcgcccatcgcaacaagagcgttcactaggcggttcaggcgaattggatcacgtcggccgctggtggagttgacaaggcggaggaaatcttcataaacgccgccgccagaagaccagccgcgcattttacgctcaggcgcgtcaccgaagccggagaccagagtttcgagggtacggtagtcgccctcgatgatggtgcttgggccgacgatgcgacaaaaggtggtgtgggcatcgttccagtgcttgccgcgaataagacagtctacctcacgggcagaatcgccgatgtcgcgagcatacagagccttggcaacccagatccaggcttcgggaagctggagatcagtgatgagatattgccatgccaggtcggaggagccgtcggcagcgaagggctcggggagttgagcggcgaagcgggcgagagtttcttggacagcgccctttcggtcgttaccttgggagaggtgcaggaggacaaacaatgcttgatcaagctttccgcctgcactgagttcagaagcaaaatcccggacgagttggtcagtttggtgctggttgattttgatggcctggttttttccgactaccgcagcgagaacgtggtgtagctggaaggacagtcggttggagagacggtcaccggagacggattcgggaaggaaagatgcggggaattcaacgggttgggtgacgtggccttgaatcgccgagaaggccttgagcagaacccaaagaggagattcgcgcccaagggtgtcagagccaggctgcgggactgcacgggtactagcctggtgcgatgggtgggggaaggcgggttcttgtccggtggccaagtccgcaaggaacttggagacagctacctcgattggctcatcttcagccgtgcaataccacagacgaagaccaaaggcctggaaccaatctaggtcgaaccgctcggtgaagccaaagctggaggcccggtcttcaagcgcaccgcccgatttgccttcgctgcggagagcattcccagcgaccagttcgtaaagggctcgtatgggttcagtcatctccgagagtatgttgttctgacgccacacatcgatttggttcgctatgtcggcacgcgaggtagcatcgcggccaatctgtgcgactatagtcgccagatggggattttgactgtcaatcagtgtcttacaggcttcctccactcggtgcgaacagatcaaatgaacggcccgttccacaggggagcgaattgcatccaggttttgggagtgcttttcacgaatgattccctcccaaagacgagtgagtcggtccttcctgatccggtgcgcaaattgctgtcgtaggcgcggcggtacccccgctgagatatcgtcctcaatatcatcattgaaaagaatgttgagaagctgccacaccaagcgctcttcttccgactgggaacgggtggatggtgacagagggaactgcgacaggtcgatcctggccatacgaacgaaaggggtgccatcaatgcgctggatagaggactgaagccgctggacatcaagcatttccctgacctgtatcatcattagtatccagttcaataaaccaataaagccactaaacctacctcgctagattggttgtatgtcatgactgcaatatcacggtcttcgctgaaaatggagaagctttctttccaggtctggttcacccctaggattgtgtcccccatatcatttttgacacagatgagggaatccatgggaccccagcggggtttgaaagagtcatggaaagcggcatcggattcgctcatttgtgttgtatcgccagcgaaggtcttgggttgcttgttgtaaggccactagaggaagaaaaatggttttagctcaggttatcacatttgttaaactatctgaaaagtgacgcgcaatttcatagatacatgatgcagtgagaaaaggaaaaaaagaaagggaattataatcagtgtgaacataagaagggagttctaacctcaaagccctttggcgttgctttagccttcagcggagaaggggcggcttgcttgcgcggctgctggaacaaagagttcataagatcaatgctgtttgagaagcctttcttcggagatgctgtcgcaatgtttgtgggagattcatcgttcacgaggttacgatcaatgaaagcgcttgcctgcatttcacgcaaggcatcacggttctgcttgcgagggctgatggtacgctgcagctgctcggcccagtcgccactaagatcaagctgaggctttgcgggactgccgaagtgtcttgacatatggtaagtggtatccaggtcaccattggtgctctgatagtcgttccgctccacggtgcgatgaggagtaggaaaggcaccggccatatccatttcatctgcctcatctgatccaactaccgaatcgccagactgttggctctcggtgacgacgtcgtcgtcattctcagtagtcgaacccgtggagccttcctctaaaaaagactcggtttcaccgtcagaaaaataatcatcctccacaggcatggcctggttagcgaaagagccaggaacaagcttgcgctttttgaagtcgaaagtatcgtcttcaacaccaatcatggaaccgacgaaggactcatcgatagaaaaggtagactgatcgaaagacgcggggtcgaagtgagccctgctggtagcgtggtcagggccttgggcactcatggtgctttggtcgtgactctcaccttcctcttcatcgtagtcaaggccatatgtagtgaaatgaggcaccttgaaaacccaggttccagtctcagtttcgtagttaacgaactcggtatcgcccactttctgcagacgatcaatgtgtttgtcaaacagaggaccactagtgacaggcgagttgctcttcttatctctaccacggggccaagagttctcaatccgtagggtagatggcacgttcagtcccttgcccctggcaggcttgaccgattcctcggggtagacagtaatcttgcgaagaccaatatccacaatattggagaaaagattgtccagatcaacggtagtcagatcaacggggccgttgaaagtaacagaaccacagttctgacggccaacggtgaagtcaacgacttgtctgagctggtcgcggctcatcctgctaagctcggcacgggaaggttgcatccagtactcaccaggtcttgggtcaccaccggggatgaacgtaagacgcttaacagtagcaccgttggtggtttgcggtgcactttcggggacaacggcaaggtcacggcgggcagattcggcctcgggacgatcagaagtgccggcagcatcgaaaccattcaggctaccgctcttacgcacagagcgaaggaacccaagctcctcagcagagggctcggaactgttaggttcaacgtgaacaagttctccgccattgaccccggaggtatgagagtcgaagctgacctttttcttcagcttgtcggaagaatgggcatcttctccgttagtgagcaggggggccggggtgtgaagaggggccggggcaatgcgagaggtcgagaatatttcatttctcagaccacggttgatagtgagacgcttcagactgctgttaccacgtacgctgccagcctgcagggcaccgggagaaagaatgctgtccgcctctggatcgaaggtcttgcgaaggttgctagtggagtaactcttgctgaagctacgtccaatgctgccattgacgctgccgcggagactgctactgcccccagcaccacccaacaaactactaccaagaccagatgaggcaccagtgctgccagatggcgagccataggtagaataggagaaaccatatccacgctttggaggggtgatgagtcgattggcagcgttgggagtaattctgtagaccggcaacggagttcgctgcttttgcttcatgctggaagacagtggcgtggcaaggggaccgggagccgatccaccaggggcaggaagaccagagaagatggactgacttccatacgggtttccatcaagaagcgacgcttggaagctaccaggggcaggctgagactgttgtccgggcattgaggcaccgaaagcactgacacctaggccaccctgcggttgctggttttgaccaccgaagagcgaagagccggcgccttggcccgtgttggtttggccgccgccgaacatgccgccaccaccagttcccgtagtcgaggaaaagagaccaccaggcttctgctgctgttggttctgcgtgttgaacaagctactaccgccagcagctggctggggctgcgaggcaccaaagccagagaaaccacccgtggtgggagctggggtagatccgaagagaccaccgggcttttgttgattctgtgaaccgccaaatagcgtacttccggtaccagcttgctgattttggccaccgaagagtgagctacctccctgctgctggggttgctgctgggctccaccgaagagcgaagatccagcagctggagtgctgccagcaccgccgagcaaacctgttccggctccctgttgcggggtgcccccaaatccgccgaacaatgacttgggttgggtttgagcttgattctgttggtttgcaccaccgaaaccaccgaaggcacttggtgcttgctgctgagcaccaccaccaaagggtgaggctgtggcggtcggagctccgaacggattcgcggcagtggttgtttgggtattaccgaaaccaccgaaggcgccaccagttgtaccagtggcgccaaaggcgggcttgttctgctgttgctggttgttactaccgaacaaagacccgccggtgttgccgaaagccgatccagtaccggtgttgcctccgaagccaccagcggtctgtgtggctcccccaaagaggcttcctgatgaagctgcaggagtagttccaccgaataaggaagttgctggtttggctgctgaaccgaacaagggattagcaccagtggagccgaatccaccggcagtctgggttgcaccgaagccggttggcgcacttgtggcagcccctccgaacggagtggtgctagcgccaaaggcaggagtagctgttgtattttgttgaccaaatccaccggttgtagtgttaccgaaagcaggagcgccaaaaccaccggcttggccactgccgttgccgaaacgacgaccttgttggtaatccgctaggcgcagttcctcgaaagaccatttactgtagggttgcataaaacagatgctttggtagtggttcgtggtgttggctgagctggtatccttctcgttccagggactgaacggggtgctgccagtaccttcgcagttaggtagacctccttggaaagcagtacctgagccgccgaaacctgtgctgggggttgtggtgggggcagcggtagatccgaagccaccgctagtgccgaatgcgctggtaccggtagcagtgccaaagcccgtaggtttggcaccaccgaaaaggcttccacccgcaggggttgcgctggcattggcgccaaagccgccagtggtaccggtagaaccgaatcctccaccagcaccgaagccgccggtggtaccagcagtctgagtgcctcctccgaagagagacccggtgttaggagtgttgggggtgccgaatccaccggggcgagtttggccgccgaaaagggcattaggttgttggggtgtagtattggttccgaatcctaatgaaaatcaagagttagcaaacacgatcgacgtttcaatgaagcgactaaacaagtgcagattgatgaagagtggtcctggggcgcatgtcggtggaaatgtgggcaagtcgcaggtgtggagattccaggggggagccacgagcggtcattccagggggaccgaggagcacattcacagatcccatgtgcgcgagcggtcgtttggatcgcaaggccacgtgatgcgacgggagacctcgccagggaaaatcgggagggcagcgcaaagctcacgattgagcacgtacctccgccagtgccgaagccagtagatgtgctaggggtgctaccgaaggcgcttgaagtgccagtagtagcacctccgaacggggaagctgtcgagccaaagcctagatgacggaggggatcgcggtcagagagacttggattcgaagaagctcttgcattccttatcttgttgtggtgtcgctaatgcatccaaatggtccgctggtgaatttcaattgcacggcgaagcttattatgttgaagttttttgtcttgcgcgtggcaccatcgcgggtcggaattaggagcatcgattgttgatagggaaagccgaggacacgagtagaatgggaaacatggggatatggccccaatgtacaaggggaattcgaaaagggggacagaaaagacctacctccaccagtgctggtgccagctccgaagccagtgccagtaccaaagccgctgctttggttgttcgaaccgaaccctccaaatccgaaagacatgatgtcggctggactttgtcgggtgttcacgaagtcataggttgattgcgcacaatttcgagagagtgcagatcaatagaatgagacttgcgagaaagggtgcgcggagatgaagagaagagaggagacgcgacagaaaagaagagttaagtttgctggagacctgtgttaggtaaggtccgggtcacagtgatccgtcacgtgacagctgcctaaatcggtttcttccaatgaatgcgagcaaggacaatagatgataacaatagagttgtttttgatctgtttattgacgggtgactcattgatgcatactgcagcttgaggtgagatatcttatttatcgacaagtattgttttttattcacaattgatgccaaggtgaaaccttatgtatacatatctacttgatctagtttacatcccactctaattctttccctttcttaattcttgctgtattcatgacttccaaatgatccgtcagttcctacaatatttaaccaaagtcttacttccaaggcttatatcgacatgattgattcctatcacctctaaacacgaagaagaacgtatagacaggcccatatgcgtctagtacctcgtaacctataatatgacacatactagctccgtatagatgactgccatccaatcaccttaaatctcgagtgatcggtacaaccacgtgcgcatatcaggtggtcaccgctgtagaccggactcccacgcgccgaaggcaactataaaaacacagcctcattgctatgatttcctaacctaattcgagataagatagttactactgataattctcaacaaaagctagagagttcataggttattcacatgaggttggttcgcattctgcatgagagaccgcaagccatcattaagagagttgagatctcgcggaggttatgtaggtccacgacgagacaacagcgacttatgtacggagtactccgtaggaactatgtgcataatgccatgccgactacatccaatgggggctagggcaatgcaggtaagaaataacccctcattgggtatgtacgaactcacctgggcataggaggataggtcccacgatagaaggtacccaccgataaacactatacctaattgggatgggccttccaaggttggcatcttggattatgtaatgtgccattttcggtctgaatccggcagaattccgactcaaaggcggaaggcatagttaagccaataggagtgcttccaaaagaaaaccaagcactaagcctaattgggaagccttggcgctcccgaggtcttcattaaagagtggggttgattttaagtctggctgcatccgggtttgcccagggtttggtccgaggtaagtcatgcaagacgtttacatgcaactaatggattgttttacaattggtacatagatattgaccccgataattaaacataaatccaaaacttcgaactcgaagtatatttgaagcccaaaaaaatactattcacatcgcttctgagcgagccaagggaatctcaagtacaagtagtcatcctgaaatcgggcaaaaaaaaaaaagaaaagaaaagaaaaccgcccgcatagtcgagtccgattccgacatgaatctggaccgaggtcgggggtgtatgatccactgaggatcatcgtgctacttccaaaatctcaccgggaattttgttctccgacgtcattatcatcaaattcatagaccttcactttacttctggcgggcggcgtggacggttgcgatgatcttctccacgacactggggtgggagagctataaagatgatttcgttagttattggtctagatatacgattgcaagtgttgaggattgtgcttaccgttgagatatcaccgaggctgtcctcctcaccgctgaggatcttgcgcaggatacggcgcatgatctttccactgcgggtcttggggaggtcatcaacgacgaagacggccttgggagcggcgaagggaccaatggacttgcggacttgcatggcaaggtccttgctgatgttttctgtcgcgctgccctccttgagagcaacgaaggcattgacagcctggccggtcagctcgtcggcaataccaacgacagcagcttcggcaacgccagctatttatagttagtataggctcagtcggaaggttctgtgattgcacttacggtgctcgagaagagcagcctcgatctcagcggtggacagacgatgtccagaaacgttaacgacatcgtcgacacgaccgcggatccagtagtagccgtcgtgatcacgaccagcaccatctccggtgaactacatatgagttagtatcaatcccataaagtgaggttgcaggcgtcttacgtagtaacccttgtacacattcaagtaggtatccatgtaacgcttgtgggcaccccacacggtgcgggccatactgggccacggctgcttgaaggccagaacaccctcgacatcgttgccaagaatctcctctccggagacggggtcgatgatagcaggctcgataccgaagaagggcagggaagcactgccgggcttggtgggggtgatacctccgagaggggtgatgacatttgagccggtctcggtttgccagtatgtgtcgcagatgtgagcttcctccttgccgacagactcgaagtaccacttccagacttctgcggcaatgggctctccgacggagccaagaatacgcagactgcgcatcttgtggtgaatgtgctcatctccagcgcgcttcagcagacgcagagcggtgggggcaacgtagaattgtgtgacgttgtgcttctcaatgacatcccagtagcgggagaagttagggtaggcgggggtactctcaaagacgacggtggaacagccaagcaatagaggggcgtacacgacataggtgtggccagtaatccaaccaacatcaccaccgcagaagtagcgatcatcagagtggatatcgaacacgtactttccagtcatggcagcaccgagcaggtagccggcagtggtgtgcataacacccttgggctttccggtggaaccggaggtgtacagcaggaagagagggtcttcggagctgaccatctcaggggcgatgtagttggggtacttctcgacctcctcgtgccaccaaagatcacggccagcggtccaggggacctcggcaccggtacgcttgaacaccagcacgctgtgcacatcggggcattgcttcatagcctcgtccacaattttcttagtgccgatgaccttgccaccgcgcttgccctcgtcggaggtaatgacgaccttagaggaggcgtccaggacacggtcccggagggagtcggaagagaaaccggcaaagaccacggagtgcacggcaccaatacgcgagcaagccaggaaagcgatcacggcctcgggaatcataggcaggtagatggcgacggtatcacccttcttgacaccacgctccttgagggtccaggcaacccgggacacttcgcgcaacaactctccgtaggtgatattgcggccctcgctgggctcatcggcctcgtaaataatagcgaccttatctgggttcttgagggcgtgacgatcgacacagttgaacgatgcgttcaagcggccctcgacgaaccaggcattgtcgccgttctcgaatgagccgtagtgtgtagtctcaaagtcgcggtcgaatgtgaggagctcgcgggccatgcgggcccagaaagtgtcggggctcttgatagattcttggtaaagcgtcttgtaatcttccatgtccttgaggtgagtgccggtggggtgcttatcgtggaacgccttggggacgtggaaagtgtcgacatcgtgtgcctcatgaacctagggcacgctgttagcctatgatccgcgggtctgatcatcttaggtaggtgactcttaccactgcgggcttgggaggcgaaactgggccgtccgacatgattgcgcggtccaatgggaatgattaatgcaggattccgtatataataaattctgcgcgagaccaaatgttagaggaaatgaattgcgaaaagtccagaataagaatggagcaaaagtgggaggagctctttattaatgcaaatggtggggttggccaaacttacttgaaaatggaggttataagttataaagcggtatggacaaacggggagagtcgcgggggggtatgtatagcaattagagaagagaaagaaaagaagaccaggaggggattcacgacattattagtagttccagcttgcccggggcgatgtgccactttccctttccttcccttccatatcgggggtggcccgtgcatggcagtatcataaattacgccaataccactctatacatcgtgtcttagccgcagacggcctctaatctacatgtacattgtagaactggactgctccacttccgatctccgaaatcaggatggaatccgatacatttcgagtacaattcactccagtcataaccccgtgtcattgcccatatgagtttgggttcggccatgcgggggtttgaacgtcccttccgttgctccggggtagcttgcccctccacgatatttgactaagatgctgctcgccacctcattggggcgtttcgagtcgggaagaaacgctagttggaccgaccacggcctagttgttctcgtgttcaaccctttgtccgagtccaataggcgggggccataatcttggcttagccatgggccaaggtccggggaatgtcgcgggccaggggagagcgggccacaggaggcctgcaagtcagtcacgtcagtgagattcagagatacaagtgtacgacttatcctcgagccccgcgagctgtgtcccgccaagccttccatgttgcgttcgaatataaaagacctacctcatgcatcccttgtatcgattatgctactcagacctcgggaactcagttggacttggatatgtcataggatgatgttatgatgtcacgggattttcggaccgagtctcccccataaaacttagttcgccatcgaggctcatcatgggaccggatcgccgacttcgggagccctagagaatgtggggtggatgagtcagcgctccaaacccgcaattggcgctgtttgatcggatgaccatcgtcgtctgaaactttgacattgcacgtatgtggtaatccggaggaatcaggggggattgatattaaaagattaacatgggcccactgttcggttacgagctctatttgatttactccgttcccatgtcgttactagttatcataattatcttattgttatatacggttttatgtattgtggggtaaatgagggtgagacaaaaagggggggtaccttgcagcactggggatttcgtctatcttactagccttactactcgtactatgtactacaacatttgtactttgtcctttttccagttctcaatgttgaactgggggaaatactttaataaagatccttctcctattctaggggcccatcctatctcttaccacgagtcaggtaataactagcctgttctacgatgtgcatcgtacatttgacggcgggatcttcgcccctctgtaactactgcatgaagatctgtggaatacacgaaataaccacgctgtgtagcttctctgctaaaaccaaaagggcagtctaagatccaccttttcccactcatttcccaacaaaaagaacaaacgtgataccgcacgctacaccgggtgatccgacggggtatgaagccgtattggacggtaattaccagaatacgatcctggaaacccagcggggagaaacccaaaacgggccaatcagcgcaacacaattttccatcaccaatatttttgtgggacgagttccctcagagtgcaagagtcccgagaaaagaccgcgttaactccatgccttgccccaacgaaagacctcgggaaacatagcgaggtccaattccaattccacaaggagtctgttgagaaaatggtccgcaccgaggcggttgtacaagcaaaacgggcaaaatcctatgcggcccttatctcttaaatatacggactacctacaagtagactaacggtgcgccacgcgtggcttacatccttttcggacgggcccgaacgactatacgagcattattaatctcaaaggtcgcgagcaaaatccgaggaatagaacgcggctagatcgccacggctctcaatactgccttgctagtcatgtcgattgcagggaggggccgccctctttagcctcggcatttgttcggtatagtcgtcagccatgttcctggaggtgaataattatcgtcggtttcgaatacgcagttaagagtggacgagcggatcattgggcggagcagggtgcggaagatgaagccagtcctggcttgtagcccactatggcttacaacatagcggcgatcagcttattttgagaggtacaacctaggcaggagatgagaccacctccctgttagattcctggggaagccatctccaggaaatccaggatgtctgacgagaattcccgagtctatctataccgccttcttatacaggtacaccgcccttcttattcaagtttaactggtggacaataacatttccggcaaaactattatcggggtgttaacctggagcggaccggggtaagggatatatatagccgacaaaaacacgggggactttcgtcatggcgtattcgaacattcttgcttttattgttcagatacaaaggtgccacttgttaacctcagcacgttgacttgaggatgttctagggtctatagtggttaactacacacacacaccacactggtattgagtcagtcctttatgataggaacaacgtttaacatttgcttaaaaaaagcttcaactctatacttcgtctgcatcttccatttttgatatgcttatttccaaccccctgtagagttgatagtcatgataagagatatttgggttcgatgttgcgggaaggcgtcccccttggaacctgcttatgattctcagcttccaccgtctgattgaaattacaacattttttttcagtagacggcctgtttgaccagtgtcactctatccataaaatgtacggcacaaaaggcgcaacacgcgcccttcattccaatacccggcggttcaccactaccactcgactacaagcaccatcaggcctcaagatcaatccggagcgcctatggaacacactacacgagacatgtaaatggggtgctgagcatcgctatggcgagtatgtatctatttcccattcggtcattgaacacaatctaacgacataaaagaaacccaacagatacggggatggctcgtctcactctcaacgatgacgatgcccgtgttcgtcggtggtttgccgccgaagtccagaagttgggctgctctctttctgtagaccagatgggaaacatgtttgggcggcaatcgggtcggttgaactcggctgcgccaatgaccgcaatgggaagtcatctcgacactcagccgcgaggtggtcggtatgatggtattctcggtattatggctgcgcttgaaattcttcggacaataaaggaaagtgggttccagactaactatgatatcggggtggtcaattggaccaagtaagcatcaagatttgttttatcatgccatttaagattgtcactaacaagttcatagtgaggaaggtgcacggtttcccaaatcaatgtgttcctctggtgtctgggctggtgcgattccaatccagaaagcctgggacctgcgtgatattcacgatcctcgtgtgactctccgctccgagctcgaaaggcacggatatctgggcgagattgcttgttccagcgatccagtaaccggatacccactcggagcccacttcgagcttcacattgaacagggcccaatcctcccaggaaacaaccgatcaatcggtgttgtccggggcgcccagggatacagatggttgactatgaccgtccacgggaaagacgctcacaccggaacgacacctttcagtgaccgccaagatccattactcgcatcatctaggatgattgcggcttcgcacgacattgccatgcgacacaacgcgctagcttcgactggtatcattcgagttccatcgaacgcgtctaccaacaccgtctcatcgcaagtgactttcacgcttgatatccgacatccgcaggatagcgtggtacacgccgtgcaagacgagtgcctccaggcgtttgaggctattgcattgcaagatggcaagggtgtgtcctttgactggacgttggatacggactcgccggctgtcgagtttgacgataattgcgtagcgtctgttcaggctgcggcggatcagctggttggtcgtgagaaatcaatgcttatgaccagtggcgccggtcatgatacggtttatactagcaagcgctgtccctctgcgatgatctttgttccatgtcgggatggtgtgagccaccacccgacggaatattgcagtccgcaggattggtaagtctttcttgtttctctggtgctttttcgaaatctgactgttgcagtgctttgggtacgcaggctcttcttgaagctgttgttcactatgatcaattcaggatagaggctgaagggcaaaagtaatcggtagttcaaatgtatcggcattaaactagacctagatttaactacggagtattctatgataatttcatctttagacaaaaagaatatatatcgagataagaaacgccaaatatcgttcttaacgacagaggccacaaatgccaccgactattcttttacattaaattcccaaaatatatatcacatacatgttgcggtcaactcgtcctgcacagagcagacgtcaatatcgtgagaaggtggagtccccacttaacctgccatgtccgcagaaggcgcaatgtctttagaaggctcacgataagaaatggttaggtgatatataaagtatttgcattaagcccacatcaaataagcatatttacgcccaccaacatgtcatcacgaaggtcgatctacttcaaccccgcggcagcaaatgagagcagtgccgccccgcaaatcgaaggcctaacagcattccaccaatccttcccgaactatgccccaaccccactagtccaactcccagagctcgcagccgagctaggcatcagcaacgtcctcgtgaaagacgagagcaaccggttcggactaccctcattcaaagttttaggcgcgtcatggggctgtttccgagcaatcgcagcgcaactgagcctgccctctacggtctcgctcgatgaactctccagccgagcaaaagaagcctcgattgtcttgacgacagcatcaatggggaatcatggacgggcagttgcgttcatggctcgcctcctcggtatcgaggcgcgggtcttcgtcccccggtctttgaaccagtggactcgggatctgatcgccggggagggggctcgggtagttgttgttcagggcgattatgaccaggcggtgcaagaggctgtggatgagacgcggatgggacagggtgtacttctcattcaggacacggcatttgaggggtatgaggatgttcctgcgtggatcgtggaggggtattcgactatgatgcatgaagtccagagtgaacttgctcggcttgggctgtcgggtagtgtggtgatcacgcctgttggtgtgggtagccttgcacaagcggtcgcgaagcattgcaagtcgcagaacacgactatatcggtagtcgccgttgagcctgatacggctgcatgtttatcttctagcttgactgctggaaagccggttactgtccggacttcatcgacgattatggatggtatggactgcggcacggtatcttctacagcttggcccgatctacagagtctgattgatgcctgcgtcactgtctcatcctatgagagccaccgcgccgtgcagtatctgacttccaagtctgtggctgctgggccatgtggaggtgcatcgttggctgcacttcgacgattggccacatcaaaggagggaacgtcacttttgaacaaggattctgtggtcgtccttctcagcactgaaggtgcacgcgagtacccagttccaagagacgtctctgttgacgatgtcgtggagctaactcaaactctcactcaaatcaactcttccaacctgaccttgtctgtaacagacggagtaggtgagactgaaatcgcaaactatctggccgcctggttcgcccatcgagacattgagtatcattggattgagaaggtcgctgaacggccatctattgtgggagtcttgagaggcagcggcggtggcaagtctctcatgttcaatggccacacagacaccgtcagtctctccagctacgaggcagatcccctgtccgggtcaattggaaccaagaatggcaaagaggtcatcttcggccggggttgcctcgacatgaagggagggttggctgcagggttagcggctcttgcagcaatcaaagcaagcggtcgcgtacctcggggcgatatcattctagctgcagtatcagacgaagaggatgcctcacagggaactcaggatgtgctcgaggctggctggcgtgctgatgccgctgtacttccagaaccaacgcaaggcgcgatatttactgcccataagggattcgtgtgggttgaagttgatatcctcggagttgctgcccatggatctgaccctgtatcaggagaagatgccatcctatatgccgggtccttcttgcagggtttggaggaataccaagcgcagctgccagtagatgatctcctaggacagagttcgctacactggcctaattcggggtggcgaagagccatcgtcctacccagacaagtgcactatcactgtcgaattccgaactgtcccagcacaaacggaacagtccatcctaagagacatcagcgcgctgctgaaggaaattgcccagcagaagcctcgtttcagatacggcgagccacgtattaccatgtcgcgccctacacagaaagtggcagctgatcatccgttcgtgcaaaaagcgatttcttgtgcctctgatgttctgggcagcaagcctgctgttaaggctggtccgttttggactgatgcggccttgcttggtgctgttggtatcccatccattgtgtggggcccggcaggagagggtcttcatgctaaggaggaatgggtcgaagttgggaatcttcgacagtttgagaaggtgtttactcggcttgtgcaggacttttgttattgaatatagacgtctgtatgtaagtactgtttagaagaacacacatagattatttttcaaagtttcccttgtacctatctcacaacattccaactggaaatactacttactactgcctcgtgcatttgatagtcttgtagtcggatagatcgtggtcgtagtccttgcgatcattgctacagtcggtctgaccgtctttcgtcagccgttcacctcctttcggtacttctcgtaggtacttcacgtcgttctgtttagtcgctctagcttcgtagggatgttaggtcgcttgctttcgtcgaggtttggatgaatataatcctagttgccgaggttttcggtaattgctaccacctattcaaactaatacagcccaaagaaagtattgataaatgggattattcaatagagacagtcaaacgtggtactagttgattcttgtagagcaagtgttgtgttgtggctggtgttcttatcgccacgggactacacagccagagccgatccagatcggccaccttcgcctgacgacatcccactcaaaatcgactagtacacccatctcgttgtttccattccaagcaaattgatatatattttcttggagatcccgcaacgatggcagacgaatcaccagcacagcgatccgcacgagtgcgccgagagcgccgggaggcaaagatcaaggaaggaggatcagcacgcctggacaaaatcaccagtctgagtggacgcacgccacaagctggtaagaaatgaaatttccatccccggctctagccaaagagctcctgatagcaaagcagacatacaatcccttcagcctcgccagtacaaacaatgctaactgaaatcaactacaacagaccgcgacgaagcctcctccccccagtccaagcacgcaatccctgaatctccctccccaggacctcaaaccccccagctcggactctcaccctcgccccaaccagacctgcagtcccaagaagcgatgcgcgcccagcagcaagcgttcttctcaatgctccgacaatccgcaccggaacccaaccagggcatgcatcccgacccacaagcgccaaacagcctccaggcccaacaagaagccttccgcacgatgctgagacaaaccacacaagaccaaggaccggaccaactacccgacggcgaagaccccaccatcaagctcctgaactccctcatcggcgctatacccggcggtgacccgaataccccaggagcacccccaacaggcgcaggcgcaggaaacccacttacacccggattctcgcccgccggcatcgcaaccatgctcggtgtgccgcctttccttgccaatatgttgaatggagcgccgccgcctacggaggcggagcagaagcgcgctcggatctggaagacgctgcataccgtttttgctgtgacggttgctgtgtacctgcttttcattattgggtcttcggttgcgttgttcggtagtccgccgccgaagcctgcgaccgtgcagaatccctttgctatctttgtgacgggggagttgatgttgactgggggcaaggtgttgcttggtgggaagtctggtggtatcgggatggcggtgcaactttgcaaggatgtcgtgagggatggtagcctcctgctgtttatcctgggcatggggacttggtacaatcgcgaatggcagactacggtgtactagatggcttgagtatgtgcggagtagcttcgttaatgatcagcggtatgagcatttcaatgggatatattttgtgatcattatttcattatcgtatgttgtatatcacttttgatcgacgctaagcagacatgttgaaggcccgctgagacggcgggaccgcattacgtagaacacgcaatgccgatgcatctaaaccccaatcaccttcccattgatccatacgggctcctttcttgaaatgacccgccagatgctccgcccgatctgaccaggtggacagcgaagatccacagaatccgcagcggctttcgacgttggcggtcgatccacgccaggcttcgaggtcagccacgggggctttcgtgcaaccgtggaatttgcgcagatgctgccatagataatcctttcgactgaatgaccgctcctgagtaggcttatcggcacagacttggaattcatgctcttcccaatgggcgaacgttgggaaaaggacgtcgcaaaagggacattctgaaaactggcgttcgaacgcttgttggacgtcgtggggatttggagtgcagacccaggagtcaagggtgaaatggacacttttctcgtggcgggcccagtcgtgtttcttcttgaaggactgtgggcagaatgtacactggaagggatggtctaccgccgttcgttgccgtcctcgggtgcgtctgagtttagtttgtttggggagtagtggaaatggcagccccgtgtccgctgaggaatggtagctccatgctgaagaggcgctatcggatgtttcagataccttgctcccgatgctggatactgatgacgctaagtgggacgagctctcatcaaaattgaagaaatccatggtagatatgtcgagctgcaacgggtcgatgctgtcggccgagtctatcgagccagaggaaatggcattttgaatagtcgcttctggaataggttcatcttctggcggcgaagcccgccatcgctccattggggtcagggaggacagcgtgctggtgaccatgggagaccccgagcgagtacgggatgtggaagcaagacccgcagcctggatcttttgcttttgacggcggcgggcgtttgcaaaccaggttgatatgcgtttctgggagaaccccgtctcgtgggccatctgatttttttgttcgtccgttggataaggatattcttgattttgatagaaccactcgcggagaactctagctccttttctgagaaactgtttgggttctttttgttgatggccattgtccatagtagcagcgggaaatggatttccatcttccgggacaccgtggagatgaccaaagaccggagagaaagtttcaaatcccgacggttggcgtttctctccctttgctaagctgcattctcgaaaaagggctacacaacttgagcaggagttcttgggattgggattggcaggtgcagtgcgaattatcagacactgtagccgatgcctgcgacaatgggcacatgatacaggaggacgatatgctccatccagccactgcgagacatttgtaagacttcgttgcgaggatgggccaacagattctcttgctaaagagggagcggaatcatagacaatttcagaagccttcaattcctcatgatcttgatgtccaggttgtgcattgacggtttgtgtgaggtgtgactcataattcgtccactgcgaccattccagatcactggtatctgagggaaacgggaattggtagtcagtatttgtatcaaaagaactctctttgccccattgggtgggctcaatttcacccagcaagccctccagctctatgtctgatagaggctgcgacaacggctgccatggtgaagggttgatcgatggcgaccgtgaagtcatgccatatatcgatgaacagattcgccggcgcagtgccccttcttatatatctctaatcccaagcccacaagtagtttggctagaacccgtcgcgtttatgcttcgcagtgatctgccaatatgatggggtcgtcaacaagtccacgctaatccagattaggccaggaacgtttctctccgcactagtcctaaaacggcaggtgcgcacttgcctagatgagttgtgcatattactaagctttccgcccccgaggcccgtggacgaatctcgggaacaaccattggatccgccctgcatctcggggtctgtgacctcgtgtttcctgcgcctactcagacttctctagagttgccttgccgactacttcctatctatctccataaatccttcgaggtttcagattacgcacgaggttgtgattgtccaaagttcctggagtcccatccttctaccatcatcgtacttggttgtacctaaccgagcacaattgagcaaatcccgaagagatggcatgtttggatggaacaatcccaatctcatggtctagcctccaaagatgtgtttgttcctaggcggctccaataaaattctatggaaatcgactcggaacgttgcttatcagaattaagcttatctttatgttattgcaagaccaaacacttaaagcttggttcacatagaatccgtattaggcaggacgctaagtgaactctatgctgtgggggataaataaacgaattggaacgggcggagaggttgatatggcattgatgacagtacaacggagccagagataggatattagacccggggtagatatggaggaatatgtacataacgcgactccacagtgggccgcaccggagttggccttatcgtccgtagttcggacgggggcgttttttagtcgccactcggtgagagcgccaatttatttagcgaaaactcggcatgcacccgattcccggtgaagatctagtctcgggaaaaaaaaggctatctgatataaaattaaagccacaattcgcagcctcttcagacgtacatcgatcggtgtatacaaccttctccagcgttccccagcaaataataaaccttaataacatgactggccgagcgctaacagtttctatgtgtcaacgatcaggcaatttacgctacaatgtagtatcaagtgggactgggggtggaactggggcaaaactagctttcatgagcaatgagctgaatttccataaccaaatagaatgagtcagcaaggcacttccggcaccgacattggccacacgctggtcagatctccggattcggtccgacctgagacaggtcattggtgaattcgtcgcgttgcatcgaattttctgtggaaccttccatttagtcctacggggccgaatttctctcgcgagaaaatggggaaacaataagatggccagaattcccgcctgggtttgtttctttcctcgtgggctttaaacatttcttctccatcttcaagacttgaactacacacaatggaggtcaacacagcaccacccgtctatgagaatgacaagatcgcagaacggaaagatgaattaacatacgaggaggagggccccatcaagactggcgaagtccacgatgcctttggcaacgaggagtacgctgacatcaagtataagaccttgaagtggtggtatgtactatcgttgggaaaagagcctctcgattgaccgtgctaacacgtcttcaggcaatgtggcttgctcatgatctgtgagtcagtctcactgggtgtgttgtcgctgccagcagccatggctaccctgggtctcgtccccggtatcattctgattatcggcctcggacttctcgcaacatacactggctacaatattggcctcttccgtgaacggtatcctcatatccagaacctgggtgatgcgggtgagattttgctaggccgcttcggccgagagctctttggtactggccagttcctcttctgtatcttcgtcatgggcagtcacatccttaccttccgtgtcatgctgaacaccctcaccaaccacggcacctgctccgttgtgttcagtgtcgtcggcatggttatctcaattctcctgtccatgccccgtacgatgaagggtatgacctggatatcgttcctatcattcctcagcatcttgagcgccgtgatgatcactatgatttccgtgggtgtcgagaagcaccccggtcgtgtcatccacgccacagtccccaacgacctgtacactgctttccaggccgtttccaacatcgtcttcgcttactgcgcccacgttgctttcttcggtttgatcgccgaaatggagacgccccaggatttcaagaagtccttgttcatgcttcagggctttgagatctgtctctacctgaccgctgctattgtgatctatttctacattggcacagacgtgcattcccctgccctcacttccgcaggacccctgatgagcaagattgcctacggcattgctatccccaccattgtcggcgccggtgtcgtcaacggccacatcggcttgaagtacatctacttccgcctctgctccaagtccggtctgatgcaccagaacaacaagcgtgccgtcggtctctggatcggtcttggtattgcttgctgggtcgttgcgtggatcatctccgaagccattcctgtcttcagcgacctgaacagtttgatcagtgctctgttcgcttcatggttcagttacggtctgtccggtatttactggcttcacctcaactatggtcaatggttctcctctccccgcaagatcgcccttaccgtcctcaacatcttcattgcctgcattggtttggtgctgtgcgttcttggcctgtatgcttctggtacggctatcaacaagaactccaacagcaacagcttcacctgtgccgacacggatacttagatgaccttcttgcttcttgtttcatagcgctagaccttgttaacgttacacgccctgtatatatactgcatatagattatgctcggagcgcactggctgactctagaatataaataattgattaaaaattctcaactatcttgcttgtcctgattgtagttagattgtagttagattgaatcataagagcaagagaggtgatccttaccataccagaattcggtatatagacctgctacctatagatatggaagtcttccaatggtaactagctctaagcgattgaccttgaatacaggtttcgttatatactcatattttatagcaatgttcacttaatacatggtctgtgaagcctattctattccaattcagcatcgggcgtggctgagtttgcttggatgtaactagaaaagagatgaaagaggttagaagaatagcaaacatggcgtgttagaaagagtctctagatactttgaagtttatgttgaagaagtgactaggagttgacaatgagatgaaagctcttctattgagcaatgtttgctaaagccggtcattctcactctttctaagtctacacctacaactgccaccgtgaccttcaatccccctctacttcttctctccctcacacttatccttcctctcttctttcacatttacctcaagtcaacaatcattccttttagagtgagaggtgacattcatcactcaaaattcaacaggacagtccaccaacaggaggtaatatttatcatcaaagcgtctctcaaaacgaagacgatgatttacctcaactaggtgtaccgagatggattccaaaacacctcagatctcgccggcattagaaaccctaccatttgaaattcgacgtcatattctttctatggttgaaatcgacagtctcaagaccctcgtgcgagcctctcctgtttactttcaccactaccaactagaacgcaagctcttgctgtgttaaagcctggagtcgacattgggtagcgtgactgctgatgcctatgcagtccacaagtctacttccatggaatgttcaaaaggacgggatagcaaaggaattgatgattttctgacatcctaccacacaatgaggtctcaagcctggctttcacctttccacaacattctcatcatggaagaggtcgagacaatggtcaaatttcattgctcgattgttcaacccttgatgcgatgctttgtgagagaagcattgactaatctcaccgagaagacaaacgagtctcagatctcagatcgaagagactccgagtacaacagaagagacaaaactgatgcgcgggttttaccgattccaactctgttgcaacatctatggcctcgaatcggcggaatctatcccctatgttagctggatttctatctcccagcgcattctgggagacttcttgtgcatctttgacccttgggaggcagaagagatatcttgcgtcagttatttctgcgaagaaaagtgcgagcagatcttcgatcagaccaaacagggcctggatgaagagaactccggaatcgatcaacctgacatatccgatattgctagcccatgtgagtaggaacccactagttttgaagctcgcaatttgagctctatgtgcgggtctgaaaataacaattttggctttgaagcaacagccaagttgaccaggaatcgtggcctcgagctgctgcacttggtataccccatcaaagaccaggaccacttggtagttacgaggcagttgcccccacccatgcgcccgagcggcgttctcagtgatctccacagcgtcttcgaacaacacttacaatggcatcgacactgcgttcaccctggggaacgcgaccatcgacaggagcgccgtgagccgctcattttccaatgtgacaggaaacccgatggaagttgcgcgctcccaccgctggcctggacgataatatggggtggaagttacagtaatctctttggggagtacatccccgacgcttcatgtgaatgggcatgggttatgtgggacgcagatcgacttaagcgaatgagtgctttgggggtgattatacaggaatgggagaaggagcatcatgatgaccctaggaaggattacttgtgaccggcactctatgaggcgatgtcgatatcggcacacacgacgatctgcctactctttcttattctcagcctcactcctatcgtctctcctatcatcatcatcaagattccaaaatcaagatgtcgcgaatcagtggaattgcatcttccctttatgtccctttatgcctcaaaatcatcaatgatgggcagacctattacgactttgacgccatccagccccgagggcgagtcggtcatgtatggtgtttggaactctatccttacctggcaattctacttgcccgcatcacagcctccaattcagctctcgtggcttttcggatttcgaagtgcactaatatatttctctggttgtgcaatgcaagtgggaattcggtagttatatatgggacagtccgagagaccaactggaaaaataccttcaaccgattcatggcgattctgagtccagtcctaccatccacggaattgtggccattggagaatgagtcagatctacgagtacgacagtatcttgtgcaaatggcttcatccagctacataactagctctctctgtttgtttgtataatcattcgggcccgaaatccttctttctctcccggttttctgagcctagcatcaatattaatggagccgacgtggccaccatactaagggtagttgaagattagagtctggaaagatccaatcacaatgtgtcattctcaagctacataatcccagaaagcgaaaccccctcggctagttcatctgtcccatcagtatgtaatggtaacattcttgttcaaatacttcgcgtctatcttcaagacaaggttctcagcaagccacccccccgcatcctcccgggagatagtatagccaatagccctacactcaggaccagtcttgggatcctcgatgcccacacggatagtcttgtccgactcgccatcaacaaggtggctcgcacgaatgattgtgaacgattccccgctctgcgcgaaacggtcttccatgactaccttgtctgctccggggacgctgacaaacaggtaatagatgggtatcataacaaaaggaacgtcgcggccgaagcgcgagaatcccgctgtactgcacccaattatgtgtggagttcccgtaatgccggcgcttcgaagctgggcgagggcatttaggatagttgccgcgcctttcttgcatacgtctggatcgtcgacggtcattctgcgtggcttcgcacctatggtagacacaatgacatcgacgatgtggccatcgtcggtttggaggcactgcgatacggcggagatatcgtgtgcattgcccttgatgactttcagatttggtgttgactctgaagggaagatggttgtgagtttcgagggatcacggcacagcgcaatgcatttgtggtccgcagcgagggtgcgtttgagggcagcaaggccaacgccggtgctggcgccaaagaatgcaacggacttggtttttgaggtcatcttatgggctgtggttgtgaaagtagcgagatattggaaggctatcctctgatgttgatagtggaggcgagctggatgttgttcctagtgtcttggaaggggcgatgggcttcataatatacattttggctgacagcagaaagcgaaaaatatccgagccaacgcacaatgcctcgctattttctcgcgacttgcgactcgcaactcgtattacaatgagggggagaacacgaggctaaccaaatgaggcggaaatgccgttctctcgttggttgtcgctcaacctacactactgagtcagacagccaactcttccaggccttaccatttgcctaacgagatcaggataatgaaggttttgcttgatccctgtctgattgatcactcactggaacaagcccatcacggtcccaggatgcccgaggagcctcctgtcacgggggacgcgctcgcttcggcctcggatgccgagaaaaacgcgagtttcgacgcctcaggcagaaacacaacatcgccgaagccgcgcagctgcgttgtatgccgaagtcggaaagtccgctgcgacaagcgagcgccttgttccaattgccgtcgcgcaaatatcgcttgtgtacttccaccaacagaccgtccgccaagatgggctcgccacctcgaccgcctcaacagcgcggtatccaacctaccggccttccaaaaacccgaagaagacgtgatggagaaacttcacaaccttgaaagccttgttcaggagctacggattcagctggaacaggctaaatcagcagctaactctgccgaagggtcatccggggttggttcgcctgaaagctccgcgcatgatcgacagtcgaacccatcttccattaatactgccagcgtgcaaaataaattcgggagactggtgcttcgggattcaaaccgaagccgctatgttagcagtggcttctggtctcgggtcaatgacgaggtatgccgccttggtttgttatggagtgaatggcgagttaactcctactcagcttgatggcctcagggctgatgttcgtgatcttccattaggggaacccgatacctcggacgatgaggcatcgcaggagatggtcccttctacacaagaacttgaacggacccctggagagcgtcacggattcttgtttgggcataatttgagtcctttttcttctaacctaagtgaccttcatccactcccttctcaaattccgttccttctagacgtgttctccgaaaatgtgaacattatctttcaaatagttcatcttcccaccgtcaagagcatggttcgcgattggcgcggccgtgaaatgaaggatctcacatcggccaatgaagcattgatgttcgctatttactacgctgctattacatcgatggaagaagaagatgtaagtcaaattagattttgaactttcggacggatccaagcatgcgggctcacgtctcgggacatttaggtattacttaatttcggagccaccaaagccgagctcaatctcaaatatcgccaaggcctcgaacatgctcttgccagagctgattttctgaatgcacctaagctagtcctagtgcaggcatttgtaatctttctgtatcttgctcgccgacatgacagtccgaggtttgtgtggatgatgacaggactagcgatccgaatgggccaagctctgggactacatcgtgatggaacacatttcgattatcttagcccatttgagattgagatgcggcgaagagtctggtggaacctttgcattttggatgtgagagcatccgacgatcaaggaacagattacacaatcacaggagcgagcttcgatactataatacctctgaatctcaatgacatcgacctcgaccccgaatcaaagcagacacttcaagctcacgatgccttgactgatatgtcagttgcacgtgtctccttcggcatgtgcgaggtcacgcggcagatgatgggtcatggtttcaaagaagcagcaccaagtctagaagagcaaagtcgcttattgcaaaaaatagaccaaggtcttcaacgggactttctccaatactcaaccgaatcagggaacattacatactgggtgatagttacggtcgctcggcttcttatggccaaaatgactctgcttatctacctgcctctgttgttctcctcctcgaatgaagacttctcggaggagctgagaacaaaactgctggtttccagtatcgaggtcgccgagtacaatcatgccctgaacaatgaacaagcatgtagacactggcgctgggctttccaaacctatacccattggtactctattgtctacatgatgcttgaaatctctcggcgcccgtggtcgcctctttctgaacgggcctgggtagcccttcacagtgtctggctaataccgaaccagacacacatggaaagggatttccgcatctggatcccactccgaaagctgatgaccaaggctaggaagcatcgcgatatggaattcgggcgactgagaagcgactctcaagctgtccaacagctgaagcagagctattttattgctccactcccgtcgagcactgggccgtttccatctgattcaaattctgcagatctgttccttgaccaatggctccagctagtggcacaacgggatagaaccaaagatgaagcactcacatcagggctcgctatcactaatacgtcgaatccaccgatgcaaaatacaagcacaacgcagtcaagggtgcgttctgctcccaatttatctcaaacattctcctcggctttcaccgttgagccagagtatctcgttgcagaagaacggcatttcgggtacgaagtatcaagcagtgaatctacaaacttcgactcagtcatggcgtctaatgcaggactcggattcggacccgaaagctctgctacttcatcacataatcacttctcaatggcaacggaagctcaatttgacggtcaacttgccaccccagctgttgtaccttggctgtggtctgagaaggacatgtcagctgatttaaatagcatctccgaagatcaagccgggagtaacatgggcatggatgaggaggtggattggtacaattgggccgcgtctgcgaaggatatggagtgtgatatggtgaattatagtagtggaccacgctagcctccagttatacgcggggctgctggtatccacctcggttgtaccttgattctggcattttccttccttaaataggttattggttctggtaacagattctcgatctgataattcgttctaacgccttccgagaatgtggatcttgatggtggatatttgacggagaaactgaccaatcaaacgagcccagcgaccatcggagcatatatgcgcgtggacgtaatacgaatcaagtatctaaggagtatcaaaagtaaagaaagaacatcaaaagctagagggtttactgtgctcaaaatggtgaggctgaagaaattgatgccaggtaccttttgtatggcccacaccccgcaaacctgagaaaatggattggattcatccaattcccctgaaccccgccaagacccggggcttgggtaacgtggctgagtgtcccgagatcggacctcgaggcctgataggtggccaggtgagaagctcgcttcgagaaaattctagtgccagtcttgcaataaccttggaaagctaaaagcgccacagttggattttactttcatgcacaattactttaaatcttcgagctcctcatgagaactggtcattttagaggaaaattgtagaatctggggttgaacatggggtaaacctaatacataaagccttgactaacagtttccaatagcgttatcactaaggagacaatgctcggggccgccgacttaccatccggggtggttctatattgcacgccgggccgggtgcgccgggccggtacaatctgacgccgggggcgcataccgcctacggaattggctcgcggacgccaaataccccacaaacctggcatcggtcaagatattaggtaatcattccccggtgtcgcgagccaaacccatgaacgcattcttcaatgccatcctcgaagttgcgatctcattggcgatttaccccggagaacaccccggagtaaatttgagcgagttcgggatttggtaatgactcgtctccccacactcactagtatatcaattagtagtactccatactatctggtaatggaatattctgttaacctttagtctctcacgccaagcaaagactctgggccaaccgttctttttgggcctccactagcgattttcggtgttttttctttcgcccaaaagtttttctctcttcacttctccatatcatataccttccaacatgagtgtccccgaagcaccccatcctattcaggactacgaagtgtacaatgactcaaccgacatggagaagaaggcgtacccggtcgaccccccggatgatccctttgggaacgaagaatctggggaagtaaagtatcgtattatgccatggtggtcagtatctcactctgtttactatttttattgcatcaaagagcacatttctgacttttatatacaggcaagctggaacgtgtgagagcccatcattaaccctagtcaacaggaaccccattctaacactgttcatgtagtgatggttgctgaaaacatttcgctgggtattctatctcttccatccgcagtagcaaccctcggaatcatcccgtaagaaaatttctacctccacgatgcagaaagaaggctgacatctcccagagcatttgtcattattatgtttttgtccgccatctcgtggtacactggatacaccatgggccagttcaagcagcgttatccccaggtccacagcatgggcgatgcgggcgagcttcttctaggccctatcggacgcgagattttctttgtcggccagctgctgttcatcatcttcttgatggccagccacattctcacattctcggtgttgttcaacaccatcacgaaccacggtacctgcactattgtatttggagttgtcggcttggtcgtcagctgtgttgcggccctcccgcggacagcagagaaggtcttttggatgtccatcatctctgccatcagtatcctggtagccactatcgtcacgatgatttccatcggtgtgcaggcgccctctgatgtccagaacgatatcgtcgcgaccccgaccttccaggaaggcttcttggcggttaccaacatcgtctttgccttcattgctcacgtgtctttcttcggtatcatgtcggagatgcaggatccccgcgatttccccaaggccctcgctatgctccaggttatcgatactactatgtatgttgtgacggctatggtaatctactgctatgcgggcccgactgtcgagtctccggctctatcgtcggctggacctataatgaagaaagttgcctatggcctggcaatcccaacggtgtgttatatctccttgcagtcgattcgggagtctgttctaatctctgataggtcattgttgccggtgttgttttcggccatgttgcatgcaagtacatctatgttcgaatcttccgcggcgatcgctcccaccacatgcaccagaagactttcttggctacaggtacatgggtcgcgatcggcctgactacctggactgttgcgtgggtcattgcagagtccattccagtgttcaacgagttgttgagtttgattgtatgttctatactcatttattaccgtgcgtctactaagttgttatacagagtgccctattcggaagctggtttagctgtaagtcgacttctgagactaagattgatgcgaaatagattactgactgagaacagacggcctccctgccattttctggttcatgatgaacaagggaaagttgttctcttcaactagaaagatagccctgactattatcaacttggccattcttggaattgcttgtactattgtatgttttgtctctctgtgtgattctgaatttcctgctgacaagaatagtgtggattgggactctatgtctcgggcgtggctatcaacgagagctcgtccaatgccagctggacctgtgccaacaatgccacctagactcagttattaccacggtggatatatgacatgtttctggtgttgaaaatggttgctttatatatttgctctgggaagtaaatatactggtgttaaattttacacatatactttgcatgctacaggtgttgctcaatgtctaaagggcttttatcacttgaaaatacaagatgagttctcaccaaacatagtatcacattcttctcttgtacaaattaatctataagacgtcgtcccctctaaactcccgccgaacactgatgtcatcactggtgcactattactaattgtgctttccaccgtggggaggcttgccactgtgcttcgcctctgacaagcccaggcattccgccatgttgaaaaatatgtcaatcgagctgtaaacacctccaaacagctcctgacacgggccacgggcaaagactggcacatccgtcaaagagtggactccctgtcctgcatcaaggggaagagttccattgaccatgaagccactcacggcatccttgtagttggcaacgtatcccttcttcgtgtcctttgtagcaggagtacggggaccctcgctgtgaacccggtaatcctcgcggtgatcagggaaagtaacaacacccgcttgcagggtgtatcgggggtcccattgggcagggaagtggacgccttcggagtaccgcaaggcattggatccggcgacggtgtattgcgacaagccggagttctcatagtnnnnnnnnnnnnnnnnnnnnattgcgacaagccggagttctcatagtatccgaccgcattgcgcttgctgcggtcgtcctcctgcgcctccatgtactgcgtgtcgacggatccggtcacgtcgaaaccgtggccgtggtcagctgtgacgatgatgagggtgtcttcgagctggccaagcttctcgagtttctcgattgttgcgcgcacggtatcgtcgagctcgagcagctcgcctagggaccggtcatagtccagagtgtgcatctgcttgtcgatgctggcggcctcggccatcaggaaccaaccatccttgcggtgtcgcttgtggagcacgtcgattgccttgagggtcatgtccttgagtccggggagatcatcagcgtcgcggtctgaaccgtcggggtagttgctctggttgtagaggttggactggtagacgttgcgatcgagccaagtagcgagattggatttctggaaaacacccagcagcttctcgttgcttggggcgctgtgcagcgctgtgttgttccaggctacgttgtaacccttctcggcgaacagcttgtagtagtcacgcgtttcctcgctctcgaggaaatcctctgcaccggcaccaaggagcacatcgggaccatcccagtttgtccactcgtacttggtcagaccttcgtagtatgagccgatgacatggtcgtattcgccacggtcgctagtgtgagcagcaagaccggcaggagtagcatctgccaaaaaggcagttgacacaatgccaataccggaaccggggtgctggcgacggaagatctctgcgattgtctcgaatttcgggtcatcgaaagcgtcgctggaggagtccacatagacacccaaagcattgacggtagtcttgtgaccggtgtaaagggccgttgcggagttggccgaatcagtaatgaaagagtccatggagtgtgtcatctggtgacccagcacagggaacttgtccaatgccatctttgtcatgtatttgccgttgatactgcggtgggcaatgagacgtgctgcagtaatcatgttggtggtcatgccgtctccgatgaacataacgacgttcttcgcgcgtctcttggtaggaagatcacgaacaaaccagttggcgactgtcttctgctttccgtagtaggtcagagtagcctcgtattcgccgggctcataaagggcgattctcctgtagattttcgaggtcacattgacaagggaaggcgtgtctgcgtcctgtgcgaatagatctgttccagttagcttaggcgttccccgagagctgaatataggaagtcattaccttcataccatgtgaagttccacttttccaactggggttcatcaatcttgaagtactttgctgcagtgacagcagatttacccttctcctttccattgcccttcttggcgatggtgaaggtgaagttctcgtctggcgatccaacacgagcttcagacccattgacgggggagtgtacttcgagacggatgtcgaagtactgacccgctaggaagtcgaccctgcaaatagtaataagtggctagagcttaggtacaattgagacgttacatactgatcaggtgggaagatacatcccaagtcagggcaaccacccaaccgctggaaggtctgggctgccgcgaacgagacaaaacatgccagcgcggagatagaagaggcgcgcatcttgataagccgattgtgatgaaacgtagatattcacatttggagagaaaacacctccgttaaatacaagaactccgcagctgattgcaagcaaaccctcctgccaagaatctcctgccaagacaatctatagtggtatagacacaaatctccgaagtatcccagtcccttgataaagtactattgctacatcgtacatttctttatggggacgaataggagacaagcacgatctgcacgtgcgtaatcctggagtttacctgggaagcttgaacctccttgccaagttgagggaacggaatgccaagccaatccagccaaccccagtcgtccgccaagcttcgagggcttggcagactctcgcacgtgggatggatgggagatgcggtggaatcacgttctctttactgaaggccgttcatacgcctgggtcatttcctatgattggatatatatcaaatcgagaaaaggtaatcctaagcgctcggctgaaatgtccaatgtgagatgaaaatcaatagacaacgtagaaaatgagaatagatagcgcaacatggtgtcgtatagtgcgtctacaatctcatgctatcgtatcattggccctgtaacttcagctagttctcatctccgattcgcaccacccttttttcatatagagggtgggggacctcggctctcgcttgggataaacaaactgcgcccttggatcccagcgaggtcgtacgatccttatctagaagctgtaaagctatccgagtgccaaaagagcctgagtaccacatattctagcacgtgcccctatcatcatcgtcgggctcgttgatacacctgaggattttactgcattggcccggactccggctcatcgattagaccaaagctctgctcaccagattacctaagaatacacgtgataatcatgtcacatgatgggccggtgaacttagcttccaattattgattgcggagcgaagcgaagcaattaaatcataacctcgtgtgcagctccagaatcataagaagctatgcggtggaaagtcatcggctaactttggcagaataacccaaccggcagagatcgactaggcctaatctggctagacgataatttctttcaataccatttcaaaaccttacctttaccgccttctcaatcagttcccacggttcataataaccctcatttctgccagtttttcaagaatcaagatgtcaactctcaaatctttttgggggaaattgatgaaaatgagataaaacggtgaaaactaacaatttttcttcgaggctagcccgcctatagatagtaccttacgcaggataaaagctctacagagggtgcctggcctgtgatgacccggaatgtaactaagtgacttactttactaattctaaaccagccctaagcaattaaatcactaacttatggtgtagactaagaaagaatgggtcgtttatcctgatgagaagtggtgccgttatcctagatgtctacatcaagtgagtttagtttgaaacgattgacgaccacttgaagtagtttggaactaattctcctttactctagactaccttcaccaataccaatgggattaagcaccatattgtacggaaacaaatgactagtaatggcgatatcatgacgtggagtgctggtggttctccctctctggcttcgctccaggtggcaaatggtaagtaaactcgaagattagatctgatctagcttctgactagtttagacgatttccacgagctgatacggattcagtataaacaaattcatacagtttaagaggaacaccgtcctgccctacctttaaagcgcaatggcgaagtaagtattgccctgaactagtcctgacctagttcctgatttctgaatagtttaatggaactgaaatgcgtcgtcagctccatcagatgggtcatactggtgcctgcgtgtcgtgcgaagctgaatttgccaccataggtaagttccccctaccgctaacccttttcaaactagtccatatctaatttataactaatttagcttgctgtactcacgctcgtcgggatcagtgtgattactttgagtatttctctgatgaggggatattgcggaagataagttcaaagaactgatcctgacccagttttgactaccttgacctcggggctttatatcttctggtgtatgacctcccaattagatcgaactgcttgcagtcagcaaaaatggccccaaggcgtgattccataatattagcagggaagccctagagtctataaatagacacaacatatcttgctttttttatggtattaaccttagggctttgaaatcaaaatggacaatgaatcgactacttttatcggatgctcaagatgactgctagtattggacaaagaaacacctctttcaacgcttattgtactaaccaagctgtgctatgaacaattatacgatgtaagaatattttgataatatagagttttcattatcagtctttgaatgaatatactgaaatccgacttgaaacatggaacatacatcctcatagtttaaatttagccctttgattttcacgattctctcaagttcatctctttctctattgtctgattgatcccagttcaaagaaagccggtccaaagcacagaatctataagttctcataatttccaccaagtttgccttttgattaacgacacttgacaccgacaaagtactaatgccccttcaaggtcttggactgatatcgccttttttacagcaatcttcataccagtccaaggttggaatttctaacctctctcaaatgctatctccaactctcaaatacggcagtcgacaagcccttggccggctactacagcaatggatcgaaagcccagaatctgactcgtcggggggaatatgtccgattctgccttctaaactaaaattcaaagacctcaagaagtgcaagaaacttgaaatagatatacagatgcatccttatcttccaattcagattgaatacgaatttgaacaacatggaataatgggaccaaccggcggggcgtgggacatggtctccatagaagaacctgacgctccacgagaccctgaatacccgcacgttcatacctggaaaggacaaattgcgcctggggtactaatgattgaggaaataaagaaaatacccggtttctttatgtcggaagtctgccaggccatttaccagaactacttcccgattgatagcttgaagtatatctatatgatcgacgtttgcaataaagacactcgttcgtttgctataaatgagctctataccgaagccaatggctatacttgggaaaaagatacgattaattgcatacctggaaccccggaattcgaggcgctgctagggacaaaacttggacgaactgtggcacatttggttctgggggccttcaaacgtggaactcgtcggatttcacaaattaaggtctttgataactttgaagctttgcagttggagttttccattgttccgactgatgccccggctcaaagctcttcgactcgtagtacaaggtcaaaaacgcgccgcgagcaaagcatcgaatcgaggaagcgcaaaagagactcgagtgaagagcctgcgaagaagagactgaagcgcgaaaagtgaagaggcgatttttcttaggagttggatgtttactattgggccataggttcttgttcgtctttgttcatcaggtcactttatatatctagaggttttatgctcttgtaacgctgtgtaactattctaaatatgattcaactgttcttcatatggcaatgtataatgagcttacatgttagttcttcttttagggtcatctgattaccttgggcagccccttcccctttcagatcccaacttcccagtttcaaacaacaactcatcaatttaccaagtctaggacagccacggagtattcttttattctccttctaattcccatttctttgctgatcacagggtagctgaatggtccaatatcggctctttgttccgccgagtcggcggatttaccgcactatactcaaagctccttccatcgagacttaacagaatctttcttttttgaagactaggctcttgaattatagtatcttatgagcccaatatcttccgaccgaatcaaagcaatccatgcatcttcgcccctcatggcttccttgtcgttggggcttgggattgcagtgaccaaatcctgtaagtagccaatgagagatccctgaagttgacaaacataatgtctgacgcacttaacttagttggcattgctatatggactgccatcattactccattccgtggccaaaaagggggcggtacagcctacaagcatattgccctgtcttttcgcgcaccctctttcgaaatgcatccgtggagcagcttcagtgagttgaaatgttatcctaggatagaaacatatcttcaaagtccctggtctgacaaagaaacaattcnnnnnnnnnnnnnnnnnnnnnnnnnnnnnnnnnnnnnnnnnnnnnnnnnnnnnnnnnnnnnnnnnnnnnnnnnnnnnnnnnnnnnnnnnnnnnnnnnnnnnnnnnnnnnnnnnnnnnnnnnnnnnnnnnnnnaaaagttacgaagcccacatgagacaactaaatgcctcccccaacatactcgctcttcccgaaggtacaatggcatttcagcttggtaacgttgcttctgagaagttgattatctactttcccggtagcggctactgcctccccgcactaccgagtcacttcagctatctcgaagctctcttcgcggacataagacaatacggaaaaagcatcggtgtactactcattgtctatgagcttgcccccgacaattgcaacaggccgttatcgtgctacagtgcgccatccagacactgggaaaacgaccgtcaaacattattcttcagggtgactctgcgggcgctcatcttctgcgagcgctcatcttgcacgtgggctactatcacatctcactcacccacatcctcaagagatcgtgccgagattttcggttgatgagcctctcggaggagcgatgttgttgtccccttgggttgacttcagaactgatcatccgagctccagtgaaaacgcggataaagacgtcattacggctgagactttgaatagctgggcacggatatctctgggccagacggcggaagatgagtacaactgccctgccaaagcccccgcaggctggtggacagatcttcctgtttcaaaaatctttgttggcgccggaggagacgaagtcctgttggatccgattaggcagatggccgagaagatgaaggtgaggcggcttttacaatctttgcattctatctaacaacttgtcattccaggccgaactccccgacgtgagcataagcattgtgcctggagaattccacgttgagccaatcacgggcttcgctttgaagataccccctggattgcagttcaaggcgatggcgtcatggctgtaccagacctttctttcctgtgaattgcgaaagggaatgaagatgaagacagtaagatgcattgcctgcatctcacgattgtaggtgagtaggcggtcagaccgcgccaactcgatcagggttgggggctttgttcgacgtgtcgacacccgattttcccagaccttgactgcctaacttgtgtgagatatttcaattcatattcttaccactggtgttttacgtgaatagtcagaccctttcccttcagatgcactcgatccacgatccacatgcgcggcccgagagacccggggatcagcctcggaagaagatccgaaaagggacccgcagttgctggcaatgtacaagaaccccttgatacggatgatttattcctaacggttgttttctgcgataggcaaacatcgcaaagttcgttgtatttttgtgtctgatagcgaacagagctgcaaagaatgtctcgcccggggacttccatgtcgcagccaggaattgccggagcctgagaatccccgcgaatcggaccgcacatatctgaacgagcggatggctcgggtggaaaacctgttggagaagcttctgatacgagtcgacggtgggaacagtcaacagggggacttgaaatcacctttagatttagccgaaaccagcctcgaatcgagcccctcgaccgtgacaccagccccggacagtgctccagtcttgtctctttttgacaacgaagcggttcgtgcgataactcgcatcggtcttcaattcccggtagctcccgcttactagtgaatagataggtttcaaacgaaccgacaccgttgagtccgattttacgccatatggcacaattaatcgggactgggggagactgcgccgcgatctgacagcattgataccatctcaaaagacattgaaaatcatatcggaggctagcagtagctggtggcttatgcgcgtgcagttattcggagactacgatgaatcattgctttcgtcctcggagcaacagctttcaaatagccacccagctatggttgctaaggccatcttgtggattgcactgtgtctccaacaactcccttcggggtttgatttgtcctctcttgatctgccctgcctcccatgggtcctggttgaagaatgcatcacccgtgtttccacgctcgtttgctccgatgactctattgttagttgtatcgacgggcttgagtgcttagtcctacaggggttgatctttagcaatgacggaaagctacgaagtgcgtggctttcttatcgtcgggctgcaaacatcgcccagctcatcgggttccaccgtgctgaaccagctcccaatcagagtgtcgagtttcaacaccgggctacgttcatctggagacacatccttatcgttgacaggcatttttccctgatccttggggtacacggcgctatatccaatacggcaatagatctatatcaatccaacccaagagactcccatgatttacccgttcacaatgaatctgttctgaacccgcttgctcggatagcaggctcaatcattgagcgcaatcagaccttcaccgaagtcactccggccatgctgcagatgacacaaagtatcgatatgaaacttcaagcgttcgatccccctcctttggtgtcacccgacaatcttccgccaggcaagtgtaccgagcggtcttcttgttttctcgggcttcactatcgattatggtactaccagctcatggcttggttacacctgcctcttttactagcgtccggtactgacaactcctatgagtataatcgccagacctgtctccacgcctgccgcagcatcatcgcttgttatgtcaatatccgacgcaccactgaaaacggatttgactcgaagattcttgatttccaagccttcactacggcgatgacaattattgtcaatgccctcgggccatttggcccacaggacttaaccaaaggagattacttcgctctcgaccgggttgtggctgttctagaacaactatcgaatactgttcctccggacaagatcgcaactcgagcagtacacgttctgaaaatcatcaaggcaatagggatgggaaccgaacccccgcaactggacgaatcagaaggacaccaatacgagaatggacggcctactcgcatcaagctcgatattccctatttcggcacaatatacctcgaacgtcgttccatgagcgctcaatcatctagacatattgctattgctgttaaaccgccaccaactttgcccaataccgcgcctgggcaatactacccatcatcttcatggatggacacgatgccggaccccggttatccaaatggaaatgttgtggaaacaacccaatgggcggattctaacttgagctttgatccgcctaccgagttttgggctcttaactctgagttcacgtttcaggctccgtttttggctgattatgatgttaattgggattatttggatatgggattatgacgaacgcgtgtaagtcgagcggattgtgccgaatgcaagtcttgtattctttttcctcaatttggtgttttggcaggccacattttgtgttgttcctatagaaagaagtatccttagaatcattcgacgtgccttggacagtccagtttttattagatatgttggtctgccaggtcactttgattcgcccctcaatagtttatttatagtcaatagtttatctccgtgttggagaaagagcagtccggtgagctaatgtcggtgttcattactaggcgagtaccgttcacaagcgatataaagttcactcacacccgaggaatcatcttcattctactcttgatcggatgtcgggtaggaatcctttagaagatatgagaggaaagttattgagttcaaagaacgggcagttacctggagaccgacatagagaaatgtcattgaggttttgacagcccaaaacgacacccaggtataatagatgaaatgagggcgagctgttgctgatgaatttccacacggaaggagaggacgccgtttggcagccaaggaaataatgctagcctaacttattggaagaagagggaagcaagagtgttacgtatgaagatttgtgtctattcaacctctatgaccataattctaggcgcagtgactgaagccatgaagcctgagagacaaacggcgaaaggatactgtcaatacaaaggggccagtcgtcatcccatcgcaaagcacccacagctaagcaatattcctaatacctaggataccatccggatttttcccagtcaattatcacgaggtgtgaaccttcttggtcatgacttttctcgcggaggatgatatttttcctctgcaaatcaccgtgggtgaatgtcgctgtatggcctttaaaaataaaagggaagcatcttcgaagatattccgctctgtagagtgggcccctgttataggtatattttcgtaacattgcttcgttaaggtcttcttcggagtcgaatggaccattcactaatggatctggcttatatgtccaaaatatctcatctaaaagtcgtctttggtcgaaactgccaaagtactttagggatagaagctgacgcaagtcgtcaaagtaactccaaaggtcttttagtatttcttctttctccagtattgtaagttacggccatgctaaaagaggtgtttgaccgagaatacgctctatgacaataaaatttttgcctgtctctaggtctgaatagagggcgaagacacgtgggacagggatatttattttctcccgaacaaataacatattttctccttccatgagattgacacccagtccaaatttcacaataaaatgcgggcctactccgactatttttcgtcctccatattccatgggtatgccaggggcgttttcgatttcggtaccggtgggtcgcgggtaaggcaagtcagttgcatagaacggaatctcaaatgtcttcatcatcgctcaacatcaggcagtcggtagactgagggggagactgaagggtagggcgacgaatcgacaatgggtctttttggctcaccgctctaattaccgtcttagtaattatggttttaggacggttccatggatcaggtgtacgtagttaactatggctaatgtcatcgaattttcgaagtctattcacgcctatcttcctctagctcgacgcataactttacatcgtccaaaaagttcagggaaagaatgctaggtctacaggtatcataaagaagatgacaagtgactgatttaagaagcatcgggcgctatatgatcaataatagagtctaactcaagtctatgaaggaccgagtcggttatatatgctctggaacagagatcagtaagaaattccgttgaatctccgtggaaaatactcaatggacaaggtacgtacgaaaagcccctagcgatcatgtctgggaatatgtctatgacaactcccccgtctttgtggacctggtccatgcaggcattgatatcctcagtcgcagctgagtctaggaaggttaccttattcgttagtagggatcatgtgactatgagaaaaggagaagggtatttacaatatatttcgaacccatgttattcgagcatgtgtaatttgtatagatatttgagaggctgcttaggatacagctgtcgatgaccagcttagctatatatacctgatgcgccaagaacactgacgtcattgcatggttctaacctgaccgaggaactatatctcaacatccaggtggcaactaccattacgtatcctcctgaaccgggtcaatccgtttcgtggcaccgtgttacccacccttgaaccgtatattcaagcaattgcagcaagtaatatttgaatattgccttgttggtcgttgccagggtcattgcgacccggatacgccaattaggtggtttacatccgctctatgtaaggtggtgtgatattgcaatgtccaatgaataagacatcgcactctaccttgcggctttgaactctcgtgtatatatatctatgcgaaataggggaatgggacgccgggtaatcacaacggaaatcagtagtacttgttgtatacgggaggtaaacaaaggaaaaaaggacccacagaaatttggggtatagcaggtggcaggtggcaggtggccgagagatcttattctgaaagtttcgatccttgggatgacaacagctctgtgaagttacaccaagcccgcttgtaagagggatccttggtggagcactcatgcaaccaccggagagccttttggaccctttccaatgcctcatttctctcactggctcttggttggttctggatgagcaactgtgttgtgagcactacagtgctttgcgtgaggtagtggagagaacaccaccaaggtgagcaacccaagagccaggagatgttcggttcattgggtaggagatcaagcatttggcctgccgcattgaggcagaccattgccattggcgtgtcaagaccagtggagaagacgtcacaacgaagcgcgggttgtgaaatgacaagtttggtcgaataatattgaaaagccaaactcgtgcgttgacggacaaagggtcggtcgtctctaatttccgcgaaactataagtcccaggaaggcgcgcaaaccagttgtcagccgctctgttgagcgataacatggccatttccgtgtcattccgagattttcgtcccgcttcgggagaatacaagatctcgattgcttctctcatcacagctgccaagtcaatggaataaagaaagtacaatgagacgttagcctgaatctgcaggccaggtgatgcctggtgagacatgaacggtgaagaaggcgagtgggctaaagggtcgttcggttcagtcgagggatcaaaggagagtagagaagccatgaggcggcttctggattgaatgtccaaaataagcctcattacatgctcatcccggaagtcttcctccttgtagggcaccggcaaaggggttgtacagtgttcttgctgcattctgggcatacgtccagtcacgacgcagagcaggatgttcaacaggtataacgcccaccatagccgatatctggtttctttggacacgtgtgtgatgctggggctttcgctacgaaggtggattcccatcgcgaccgccgactggattgcaatcccacattttctccatgacctaacccagaatcagtagctatgtaaagactcgcggtgttcgacctacctgttggcctgcccgatggaaagcaagtaaagtgatattagcccctctacctgtgcctgctgcaggttgggattctccaatcggatactctcgctcgtgtgcaattgccaggcacgtgtaaagtacaccgcgtggatgttgtgatcttgagattggtctccggaaagctcgaaatgtcttgcagcgatcgcgaaaaccatattcaacaacgccatccacttgtttccaggatgtgctgtggactttgaatagaatgaccgacactggcttaaaaatatctctttgccaacgacggggaaggaggcgtgggcaacttggaagtacctgtccacaagttcatcggcgaccgcttttgagggatatgcgagagcatctagtttctttatcggcgagattcttgtatcatcgataaagaatgcacaggaagaaattgaaagaggggttgattcctcgaactgaccatccggattggaacttgtcggaccgatcaagcacctaagcctgtataaccatgccgatgccgaatgttctcctgtaaagccaatcgcttgcagggaaatgtctctattaaagtcctccaaggtgtgatccacgtagggaagcgttcgggccgacgaatctgactcatctggtactttggcaagggtcggcgatgacagggaaaggctagctatctgtaggttgttagataaaatcaagaaagattttggctgaccggaatatagactcgctttttcgagagcttggtcgatgactttgcccagctcagtgtcgaataatttgggataaagctcgcgaacgagagattcgtagtgttggagttggctcgttatcactgtaagttgtctaagtcctaggggtgaatattttgggcgatcacatctaggaggatcacagacctagcatttctctctcgtttcccgtcgacatagacacagagaacgttggtctcctgacatcggaggcaagaggggcgatgaccagaacacttgttcttctgtttgcgacagttgtggcatgcctgactaactcgaccagtattgcctacaagaggaaggtcgagtctaggaatggccactttagcgttcatcggctgctccccggcggctcgagggttgttccagggacgatatgcccccaagacgatcggctcccgtggtgtcacggcctctccactctcgagctcatttgtgtagttgaaagggtccttatcatttggggggactgttggaaggttttcagatcgcgaagatcgacgagatggccttccactcattgcaacttggcccgctgttcatggtcagcgcagagtcctaagcgagaatagaaaatctgcgacgaatccgagacgcacaaaccagcttgagggaagcaccgggagcaaaaacctcctttcgcagtgaaatatctgccggtgggattgatggccggagtatagctagcaacaagacttgttttgacaaaaggcatgacacctgtgattggcaggcccacgatcccggttggatattggtcggcgccattggtcggtgtaccgagatgccaacggcccactggtggctggattcaggacaggcatgatagatgattgggatcatctggtgttgaccacatatttcaggggttggctacaggtcaaggttgctgaactgcaaggtgctttttataagaagatgaatacgatcaatgagttcaccatgaggcatcttcaataaatgccagtcggtaatcatgacctcccgaggtcgagccccataggcaaaccttggaacgatgtatccaattacttccgaccaattagagacctcgatgtggactatctgccagggtgtcaaatagagatagacattgatctctatatatacagggacgaccctgagaataagcctccttttttaacattgcgggatactcccggcggctttatatgtctagccgtcccttttccttgaatcgaatattctgtcactggaaatggacctatcgttactccccatatgccaatggcttgctctacaataatatacaaccaaagtttcggctatccataactatctttaacttaatcacattggttgtctcgaaactaggactagcgcggatagctcttagcttgatcgactcttagctttgtagctatcagcaccctcatcacacaccctccatgtgtccgcacacttcattcgccagcctaattcctgcgtagtccgacatgcaggtataagcaggataaccgaatgggctgtaagttgtatggcggtataaaaatgggacatgcaagttattcatggtcggtgacatcatatgctatattacacaattcttctatagtaaagaacaatctagcagagaaagtcaattgaaggtcagattaaatgcattgactttgtattgagaatagacagctttgccaattcacctgaaaggtgtcaacgccaagaccgggattccgctgagatgggatacacagcaatctcctggccagccctatgcttacatagattggcctaaaatgtggggaagtcatagcgatctttgcgtgtgcaccttggcaatctagatgatacaggatcaatgataggttgaatggttgtgatatcgtcatagcctcatttccctgtcgatgacgtagctctggggaaagcttccttcatccgtcgatcttgaaatcccggacaattcttaagttctcttcgctcaacaattttattctcgggggaatcctgagaaggtgtactcgtcttccttctaccgcattgtacagtcaagccaaatcaaccctacaaatagccaaaccctgaacttcgattcgtttcctttttttccgccgctctccaagatggctacaggtcatcagcatgatgctcccaagagccgccgggtcggggagcattggagtggtgccaatcctattccaacaataagtcactttatgaaacatgtcgaagacgaaaaaaaggaacgcaatctcaggatagacgaagaacaccgggctaataaagaaaggattgcacatgaaaaagcgcaaggaacctatggagagcaatcagagcacgcagatcaaaaggatcaagccgagggaggtgctgtcgctcataagccacgcgaagtctcccaggccaggattcgtaccgtgacagacccaactacgggcaaggagatcggcgtggaagacctagatgagacatgcatggatactgtaaataatccaatggtatgtgggatcatatcgaaggaatcttgaacggagtctaatttattcgcagttgacggttccgaatgcgaatcttgggaagcccacggtgagttgtctgtgaatgtcagttcatgggacatatcactaatatgcatatcaggacatccaaacaagtgccgaccaagatcttgcagagtataaaaagatacaggacattaccgcacctcccgatcctatcgccgagggtacaacctccgatgttcccattcgaggagaaaagacgaacgttctgttccaccccacgcctactgtcacgtatcagcctatgtttgacgcactgcagaagcgtaccactggcatttgcattgggatacctgttgccataatcatactagggcggatgtgcgggggatccctttggggtcttgttcccttagccgcatgcattacgagtggaatatggttatggatgaaggaagtcattcgcagcggtcgcgcaatggagtgggagagtgagcatcttcgcggtcagatggtaggttctctattgtatcaccttgttgatggatagagatactgacagttcaaaaggctactgccaatctccttcctgaatctgtggagtggttgaacagtttcctcggtgtcgtgtgggggctcgttaacccggaaatgctgacacctgtggccgacacaatcgaagatatcatgcaagtctctgcacccaaggttgtagagaatgttcgcatcgcagcaattgaccagggcagcaacccactccggattctaagcatgcgggctctccccgatgatcatgtggaaggtttgaaggaaaacatccgcgaggaaaacaaaaagaataaggacccacaggaagctgctgctgccgaagaaggagggagttactacaacatggaagcctcctttgcctatcacgcaagcccaactggtcacagtgcgtcatcgaaagcacgcaacatgcacatgcaacttgtattctatctgggcattcgaggcctatttggtgtgccatttcccgtatttgtggagctgattgaacttgtcgggactgtccgcttgcgcttccaaatgatgcccgaaccaccattcatgaaagatgtgacgttcactttagttggaattccccacgttcgagcaggctgcatgccaatgttccgaacgggtgtgaatgttctgaacttaccgttgatctccaactttgtcaactccgccattagtaccgcttgtggcatgtttgcagcccccaagtccatgaccatggatctcggcatgatgttgacaggagatgacatccacaaggatactttggcactgggtgtgatgtggattcggattcaccgcgctgttggcttgagtaaacaggatgctcgcggtagcgagggtggcggcagcgacccatacatcaacctgtccttctcaaagtatggcaagcccatgtattgcacacgtgtgattacggatgacctcaatccgatttgggaagagactgccgcccttcttgtgacgccggaattgatcaaggccaatgaaaacctgagcatcgagctctgggactctgaccgcaacaccgcggatgatattgtcggcaaggtcgagctacctatccgggagatgcttcagcatcccagtcagatgtatccccaggtctcgaagctccagggtatggatcaaggcagtgaaatgcccggtgagctgcattgggaagttggctacttcgggaaaccaaagcttcgccctgagctgcgtactgatggccagaagaaagaccttcctgaaaacctcagaggcgatccgactttcgaagacgaaaagggggctatcaaaaacgaagaggaggatgccattatgcatacaccacccgatccaatctggcctagcggtattgtgcacattgttgtgcaccagattgtcaaccttcagcttgccaatatcaagggcagtgatgggaaccgcaagggcaaagagtatgagccagcgaagccatatggtgagaacacagaggaggaaggtgaagatctcccaacgagttactgcatggttttgttgaacgaccaactggtacgtatttgtagacatactagtccactccaaattccagatactaacagtatatcagatctatcgcactcgtgcgaaggctgtgagctccaagcccatcttcaacgcaggaactgagcgatttgtccgcgactggcgctcagctgctgtgaccatcaccgtccgtgaccaacgctatcgcgagcatgaccctatccttggcgtggttcctctgaagctatctgatatccttcaaaccagctcacaagtaacccgctggtatcctctcgacggtggtattgggtttggacgtatccgcctttctcttttgttccgccatgtggagaccaagctgccaccttgcatgcttggctgggatgtcggcacctttgaatttgctggacagaacatcatcgcgaaggactttggtcgacactctaagatcaagctgcgcaccgggggcagcgttggcaagatcacccggcacaagtgccacatggaaggcaatgacgcgatattcgatatctccgatgacgctttccgcgactcaattcgcatgcctgtaaagtaccgataccgctccccgatagtattcgagttccacaacccgggcaagcgaggcgcagccgcatacggtattctgtggctccaacatattgtcgacaacgaggaaacagacattgacattcccatctggacaacaaagatgggcgctcgcttgacacagaattacgtcacggaggagaactggaaggccaagcaggtacctggactcgaagacttgacagaggtgggacgtctgcaattccgatgcaagttctcaccgggcattgacgaatcacacgagctcttcgtgattgacaacgactcccgtgagaccttcgagacgtgggaagcgtgcgtgtcccagggtgtccgtaccagcacggtggaggtcgaagttcctcctgaagtgcaggaattgcacgagcagtctctgatcgaaggacgggacatcttgaagcaagcctcgccctctgagcgtcagcggtggattgaccacgacggccaagactggagtggagcgttcggtcaagacccgcgggcgtacactgattccctcggacgcaaaatcgctgagcctggccgggaccaaccgccccatgacccgtacacccctccgcctctcaaggatccatcttctcatcgatccagttctcaatatggagagcaccacaacgaggacacctcggagtcaaatgacgagctcgagcccttgtcgagaggaccctcgaccatcagtggcagtggacctgggacgtctgcgtcacacagcaatatgagtactcgccagatcaacaaggcgaataaacacagcgagcagcgacagcagcgtggtatgatgcagtggcggcctgcgcgcaatgctgcttttgctaaagacgaggccaagtatgcgttccggaagatgaagaagaagatcggtgctggtggtctcactggtcgcgagccagatgtcgagacggagacttgacacgatgtatgatgttttatgtttcggcgttttgtatgtcctttgcatttgcatataaaatgtgaatatagatttattatttactgtttaacacccacaagttaactattgaacgcttatgactaccattcactaccatgtagatgaacctaagaatggcggtgatgccttataaaagtttaattccagatttggtcaagaattgaattcgtgaactctgctttctgtcctcgttgttttattttgtgccttatgagattgggaaaagtatacatcgaaaggatataatccatagaagatagaatgatagaaaaccatagccagtgaagaagaaaagaggcgcagatgcgccaaaagaaaccggacaaacccaaacagcgcctctatacaacatgattcgtgagaaattatatgcatcgccattatcatgcaggggaaataaaaggagacatcagacaaaaaaagacatcaggcataaaaccatgaacgtcacataattaacaatcgggcgcaaagtcggtggatactcggagagactctgggccggaggtaaccttagccgcgttcaataatgagacattctcggggccattgatctcggccctatcgacaggcccgagagtccatttccattccctccgacgcttggcccggccctgcctgggcgtgcgcggcgtcgaggagccatccgcctcgaagccatcaagcaaagcgacggctcgcacctggcgctccgcacgcatggtgcggcgctttttccgctccgtcttggagagcgaagacccgcgcacgccttcatcggcactggtctcatcgccggaggcactccccgataaggacgggctgttatcggagtcctctttttcgccttcgaggtgcgggaagggggcggggcctgtctcgggtggggttttggttctggcgagtgcctcggttcccactgcctcgtctgactcggtcacgagatccaggtgttgcgcggtgtagcattctgtccggatctcctcctccagtgggtaccggtagctgacttgtttctttgctgggaagaagacgcgacgtgagccgccgccgttgggcccatttccgcttgctgagatggagccnnnnnnnnnnnnnnnnnnnnnnnnnnnnnnnnnnnnnnnnnnnnnnnnnnnnnnnnnnnnnnnnnnnnnnnnnnnnnnnnnnnnnnnnnnnnnnnnnnnnnnnnnnnnnnnnngggcggagggttctagtggggagttgcgtaaaatgctgcgcacgccgatggggagttgatatgggcggtggttgaagatattattgttcgggtgtaggatgtagggagaggccggtttgttgtagcgcgtggatttggagggggagggtgcggaagatggggatgcaacttcgtaggcattcttgaaggtgtttcgaatagtgggggatgaagttggtgctgttgcgaaggaaaatgataggccggtcgttgaagtgccgaatgtgcgagggagcgcggtggtttggagggtgagttttggtcgggaggtcattgtgctcgtcgcttcagacagacacgacatggtaaaagtagagaagaatcaaatgtgtgtcatctcagcccaagaagaaagaaaaaaagaagaggaaagatgtttagcggggttgaactaagaatagaggaggttggcgcttgggatgtgatgaaagatgcatgtcacttgcacattccacgacttaaaaagatttaagattaacgtcaaagtgctttattcagagtatttaaaccatctccatggagaattaccccatatatactccgaagtactccgttcagcgcaaagcagagatttccatagcaattccagactccagtggatgcgtaactatcgacgccaccatccacactaatttcggtttttctattttggtagtatagcagatgttgttgtttatgtcaagagtatcttatagagtattttaaggtatttcctgaataaaaacaggatcaggagcaggatcagagagaaaacgcattcgtctataaaaagaacagggcccgtgggtctccgatctacctatacgggtatatgcctggtggcaaagacctaaatatggtgggtttaggtggaaatgccattttgcatgtcttatcattctttgtctgcctctactttgcctatacagactacattatacctaatataaagtggcactgttgtatactacacgtgacgctggctgcaagcgtcgaagaggtattcgagatatgattggtgggaaatcgatccaactgcaccggattgactagttctatcttgttgctgggggcagggtaacatcagctccacccaatggcgtcgatgacttctacctggcattttccactttcgtgcgatgccggaggaaagcgcaaggactggtcgactaggatgaggtagcacgggatctcattgagcatagatatctaaaatgaagaaaagcagcttagaaccaataaaatggagtagaataatataactgactagtaactacttcgtgcatgaactaccaggcaccaaggccaataaagataagccaccgacgccacaccagccacaaataggccccaatcgtgaagttgcctgcggttcctgttttcagcgttcgatcgttgccaggcacccgcaaatcaaggtcccatggacacgtcgacatcagctcagagttcatggctgcactagtgcggaacgacgatcgcatcatcctccacttggtagctctctccactcttactgccactggccacgctttgactaacccatatccaggattatgactgtttctatgcctcggtcttcgaagtggaacaacctgcattgagatctcttcctttggcagttcagcaaaagcacattgtggtaacctgcaactacgaagcccgacgccggggtctgcacaagttgcagctcatcaaagatgccaagcgcatctgtcccgatgtggtaatagttctcggtgaagacttgaccaagttccgaaatgcttccaaggagctttatttgctggttcgctcctttgtctggggcggccgtgtcgaaaagctaggctttgacgagctttttctcgatgttacggaaatgattgactacaacgctggcgtgttaaatcgaaatgatttaacgaattcgtatttccatcttgatcggaatgacccgaccgttggtttttcctacgatgccactcgcttccagggatcgacctttcccgcaacggaggcagccgctcaaaacgattcgtcttcgttggaaatgaggttgctcgttgcctctcatttacagggtcatatacggagtaagatagagcatcaaataggcttcacggctacgggcggaatctcaacctccaaactgctagccaagttggtcggtaatgtccacaagcccaatggccaaacgactcttctgccgccatatacggcgacggagaataatactagcaacgtgttccagttcctggatgatcacgagattcggaagattcccggaattggttctcgcatcgccgagaaactgaaatcccatatcatagggaaagagagcgtcggcgagaagatcacagtcaaggatgtccgccagttctctggcatgagcccatctttactggagagaatcctcggcgggccaggctctgtgaaagggatcgggatgcgcatgtggaacattctccacggagtagatagttccgaggtgctcgagggtcgcgatgtgcctacgcagatcagcatcgaggattcttacgggcggttagatacgcttgagagtgtccgacgagagctcgtagtgttgtcccggagtctgatccgccgcgtaagaaccgatttgcttgatatgagtgatgacactgctcctcaagggagatggcgtgctcatcctcgcacgctacggttatcaacccgaccaagacttccggcagacttaggtaccaggcgtgcatacagttccaatcgcatctctcgctcagcacccctgccaccctttatcttcaatttggatgagaatatcgatgcattagccgtacggctggtccgggaaagtgtgttccctatgtttcgcaagttacatcccgaaaaggctggctggaatctcagtttgttgaacgttgcggttaccaatatggtggagactgcgggggaccagaagcgaagcagtggccgtgatattgggaagatgtttcaacagcaggagacagtactcaaggattggactgtgcaggaacccgagccctcgtttgctaatccgcagttacccgattcccctgagatagagtcacagtcggacgatggctgggatgacgatgaaccctggagtgtggattgccctatatgtggggtgtcaatcccacactttgcccagttggcacatcagatatatcatggggatcatgaatcacagccctctattattcggcagccttaaatgccaattaatgccaagtgtcagaaattcttcaataggcttccaagcgtcttggcttaagccacttacgcgttataccagtacatactatgagaaagactattacatagttcccttggtttccttagttacttactgaagagtctcgacgttaacgtgttgggatatatatcgatgatggtatactccgcacacttcaatatcacccatggatgctataacctgccaagcaagcaagagacaatatgattggatgaaataaaaataactctctctctccacagaaccacaggaaccagttatcaatgcgtgcaatatctggaagattaaaatggcacttcgaaattgtttcagtccactttgccaagccaactggatcgaggattcctaagcccttggcagtgagccctgtacagccccggcattatctgatccctctgcctttcctttcttcactttctggtttcttgaacttctagtccttcgttgattttggtttctctcttgaaacattccttttgaacccctaaacccctggtggacccttaaaatttcccttgccactcagggtctcggaaactctattgaaaagaccggggaaggaccctgaattctggatcttgcgatgaggttttctaccattctgcccttgatcggtgcactgtcatcgctctttcaacaaacacaaggtaaatccccacttgcagcccagaccgtcgttgcccaggcctccgttgctcagcccgttgctcagcccgttgcctagctccgttgcctagccgctgacaatccccagcacgatcacaggcctcaaacgccattcgccgagtgacgcccgtcgacaatgccatcattcgtactccttcacatcaaatagatcacctgtcacattttgatatcacgttcgccctacaccaagacggcaagcgcataaagctagaactcgagcccaataatgatatcttggccgacgacgcttatgtgcaatacgtccgtaacgacggcacaataacacattctgagccgatcaagcgagacgagcacaaggttttccgcgggcgcgccttggtaggatccggaaaggggagatggacgcccgtaggctgggcaagaatcaccgtccaaagggatggcctcgagcctttatttgaaggcgcttttagtgtcaacgacgacaagcaccacattgagctgcaatcgacctacctcgacaaaaagcgcccgatggatgccgacgtcgaacccagagatgggccatcgatgatcgtctaccgtgactccgacatgtttcgctatacgcactccgagctcaagcggtcgctgcccgtatctgaaggctgcggcgctaataaccttggatacaatgctgatctgtccaatacgattttcggggatatggacagccaatggggtgtggtttcgttgaactcgatgttcggattaagcaagcgacagtccgatgttggtggtgtctcgggaaacactggcggtgtgaatctgaaatcgaccatcggtgattccagtggatgtcccaaaacgaagaaagtggccttgatcggagttgctacggattgtgaattcaccgaatcctttatggctacaaactccacacctgaacaagcggctagggactgggttatcaacgtggtgaacacggcttcaaatctctatgaagaatctttcaatgtgtccattggtttgcgcaaccttacaatcgccgagacaggctgctctagctcgggctccgctgctacgccatggaacgtggattgcaacggcggaaatgtcacctggcgcctgaatgaattctccaagtggcgcgcaactcattcagatgacaatgcctactggactctgatgactaactgcccaacgggctccgaggttggggtttcatggatgggtcgtctatgctcgtccgaactggttacctctggagcgaactccgtggccggtgccaacgtcgtagtgcgcaattccggttcttcctggcaggtgtttgcccacgaaaccggtcacacctttggagcagtgcacgattgcgacgagagcacctgcgcggataacctggaagcctcgtctcaatgctgcccgctgagttcgtcaacctgcaatgccaatgcgcaatacatcatgaacccctatgctgagagcaccatcaccaagttttcggaatgtaccatcggtaacatctgctctgccattggcaaaaatagcatcaagtcctcttgtctatccgacaaccgcggcgtcgtgaccatcagcggcagccaatgcggcaacggcatcgtcgaaggcgacgaggagtgtgactgcggcgacgaagaaagctgcagcgacaactcctgctgtgaccccaagacctgcaaatttaaaggcagcgccgtgtgcgatgactccaacgatagctgctgcgatcaatgccagttcgcctccgccgacaccgtctgccgcgccagcaccggagaatgcgacatcgccgagacctgcagcggaacctcgagctcttgtcccgccaacaaatacaaagacgacggtgccagctgcggcgccaaggaccagggactcagctgcgccagcggccaatgcaccagccgcgactaccagtgccgcacagtaacaggcgcggtactgaacaccaacgacacctgggcctgcgataacacaggcagtccctcctgcagtctcgtgtgcggcgcaccctcatcccaacaatcaatgggtgccacaagttgcctcatcatgaaccagaactatctggacggtacaccctgcgactccggcggccgctgcagcgccggccagtgcaagggctcctcggccctgggctggatccggcagcacgagaagctggttatcggcatctgtgtcggtgtcggcacgttcctcctgctcgctatcttcttctgtatctatagtcgttgcaagcgcagtgcacagctgcgtaaggcccgcaaggctatcccccctggcacttatcgccgctataatgggccccagcctactgcccgcccgcctatggaccagtggcatggataccggaatgccggctatcagaatatgcctccccctggttattccgggtatcagaatgtccctccgcctggtgtcccgtatcaaaacggcgggtatcagaatatgcctccccctggtcccccgccacgatacgcatgatcacaccactctgcttctagttatattacagtttatgggttttattgaaccttgtcttgtttgcattcgggcctctgggatttgatctggaggatttgggtatcggcgtcatcgcggatggttgtctaggtggttattatcagtcctttcgcatggataatatcatctgcgatctggggttttgggctttcccttcttgtgggtacttcttgaatttggatgcatttttcgtgaatagattatgtcgaagccctttgggctatgaatgataccgaattttcaccttgcgagagagcatgtagatgtagaggaataaatatccatttgaagtgcgattttgacccagaataaacacagaggcactgactccaaaaacaagcacatgagtaaaacgacaagagaacaggaaaagtacttagatcccaacaccaaggaaaaaacccatgtacaacaaacaaagtcaagtcatgtcaagtctcagtctccgagagcaaccgaacccatctaacaggattcaaccccaaacaagaccttagacatccaactcattgccaacaaatcccaacaaaagcctcccgagtaacaccaccaacgccctcaagatcaaactcctcaatcatagctctaagctcctcctcctcaagcccagtctcccccaactccctcgcaacacgcctcaaatcctcaaggtcaatgaaccccttgccgccctcatcgaacagctcgaacgcgcgcaggatctcgtcgcgcgggtcccgctcgaggatcttcaacgccgtgacggcctggaacgacgagagcggcatgagcagattggacggatgttgcgggttcgagacgggccctttgttggaggcgaggggttgggattgggcgtgttggttgccggcggcgccttgttgttgctggacttggggacggggtacgccgtacgttgttagcagggagatgagctcttgtttgccgagtgtgaagcctagagcgcggaaggcgacgcggagctcgtggtagtcgaggtggcgatcgcggtcgaggtcgaagagggtgaacttgaggggtttgggttagctgggggttttggatggggtttggttgttgtggtttggtttcttttcttttcactcttggagggaggtgagagggaggagggaggggttgcaggatattgcagtaatttaggagaacagtagtgtcatagatgggtggattgggtatcccttacagcttcgttgatctcttccctctgctcttccgtgagtctgttcagcggattcgcgtcctgcgctgggccatgggatacggcgtttgtggcgggcgcgggcgcggactgctgcatctgcttttggccatctggaaattcgccttggttggtatttcccagaccgcgatgccgtgagaatgaggaggcgctgaagggcatcgcgttcgtgttgacggagcgttctgggagtttcgtgccggcgtaggagcgcgacgcgaagggttggccagaggccatggtggatggcgtgttcagatttaattagatggctggatcaacagttcttcagcattgatttgagtgaggggctcgcagcccatgagaatgcgtggagagatgaggtgtttggcggtgggaggattctggagacgcgccagacgcgggcggaatgacaacgcgctgttttgcttctgttacagatgtagtggtcaatgaaaatattattgtttcttggaaattctgggttcaatttattattgctagaaggatgagcgagtgagcgaacttctagacacagcacaacctggtgctaatcacaatatcccaagctgccaacccataaaaactctttaaccaccacctaacgtggttcctcaaacttcctcaaacgagtgctgtatgttcctcccaaggacaacttgttaagaaaaacaatagtggtgagcgaatgttgctgttgccggaggtttcaacaattgtacagagatttttggaaattgccataaagtggcattgtatcgggtggcattgtatcaacaaaggcggcacccattggatcgaatccattgtcgtattcactgttgaggatgtccatcagaccattcggatccaggcttccaacttgatctggataaattatgctatcaaaggaattctgttcctgggcaatcaccgtgtcgtgcgaagtcgctgataactgcaagagcccgtcgtgctgctcatcaggattcgcaaagcgaggtcgagggaaatgatcagctaggaaggcttgcatttcgcaggctggcggcgaaaagggaccgtcaggccggcccaaaacagacgacatttcctcggggtctcccagccagaaggccatatccaggcttggagacgacgggagactgggaacttcgtcctcaagaatcgttctgatggaggatttcccagtagccccgtgtctgggggacacattgcgcaggatatcttcgagtttttcccgaacaccactcagataaaggcgaaaggaaccgaatattctcgcgacgattgggctgtattgaagatcttgcaagccgcacgtaactcggtagtataatgctgcagcgacccaagcgggctcgatctcattttctttccctggtcggtttttcttgttgctgttctgcttgtcctttccgcacagagccacgtacaaaccagggcaaaagtcctgagacatctctgcgagcttccgaaacgagagaatcaaaagataaaacgagacgagtcgcccggtggtaacatcaaaccaggacgaacggattcgagcttgcaccaagccttgaatggccataaacagatttgccattctgagcgcagtccagacgagggggttgtgtttgtattgatcttcaaatttgaccagatccacgaggggaagggcactgataagcccagtaagaaaatcatcgacagggcagtctgttgtactagatagtgcgatactggacctcgtgactgtccaatgccatgcagtgcagtttccgccatatgtttcgcggatattaacaaccgcgttgaatgcattcatgcgtttgaaaacctcgtcacccatgcgttgcaaagtatctttcgcctctggggacgggaagctaaagatcgtaagagagccccccgcaggtggcccaagcagacatagatctccccaacttcgaaagcagattcgattacccttagaagagcatggaggacatggtgtagttgttccacactttttcttggcccggtagcacgccatacatgagccgccagctttcctgagtgcggcggtatcttctctctgttgcagaagttcggcccggttacgcggaatcttttcgcggatcttatcagacttctcagggttcgctggatcccacgggacgaagccatcgggatatgcttcctcgagatgaggagatagcggacgtcctagcgcagataatggttgtgttctaccgacaccatgttcactccgagcacgctcatgttcagtcgagacgcgtggcgaggtatcattggcattggaaggccatgttgagggtcgaggattcgagcttgtaggagatacggagctttgtacttggtcttgaatcgtgggaggagtcattattgaatcaaaacaatctgggccgccaggcatatccagcccctgaggttggtcttcaatcatgggaggcgtcattattgaatcgaaagaaactggaccaccaagcacatctggcccctggggttggctgctagacatctggagttgaatgtttaccggactattgtcgactttgttgggcattttgagtatgtctggatctatggactgggtctcatatgccatggccgtcgacgacagttgccatgtctgtgacattgtatgctcgatattgggatcgggaaagtaaagtgtggctgatgcgagtggagacatggcagactgaaaggtcggtatcagtatcaataatccacgagatgtgcaagcttagaatgaaaaccacagggacataggaggacgcggtgggagatggatcgaactcacaggatagatggaatccggtgtacgtggtgtacacggcgcatatttacgcccgccatttggatgtggagacaatggagacggctgatgccgtgtagcggcttgagccatcacggtttcaagggtgaacgataggaaaggtaatgatggacaccctgaaaagtcctcgagcaaagagtgagagcgaaaggacgggcttagggcagagcctaacagcaaactgatgcttgtaccaacaagttgtcaatcctttgcgaagggagagaatgagtgacgtgaagtaaagatggaacttgagatgcacttgggggcttcaaaaatactcaaaacggactagtaccgttaggaaggccaaacctttacccgaaccttagcagaaccttgaacatcatagcgagacacaagggcatcacttgaggtgaagcaggcacgactaggcccatgaggccgattccaaatccggtatagcccatcgctaggtataaggtttacatggtttccagggtttaggggcggaaggagtatgagtactgccatgtgaataggcctagatgtgatgtatgggaagaaagatgtgagcaaacaatggagacaatcaatctctttgatatgaggtactgtccaaatcactgtctctccgcgtacctaaatccaagtcctctaggaaggtacgaccgaggagttgctcgggcaggtaatcctgttgaaccttgccgtcgacatagttcggattgtacttatactccgcaccatagcctagctccttcatcagcttcgttggcgcattccttaaatgaacaggaatgggcaagcccgcgattcctggctcgttcaaggcggcaaagacgttattcaatccacggtacgcgcgagtactctttttcgatagcgccatcgccacagtagcgtgtgccagattgattcgggcctctggaagtccgattttttcaacagccgaatgtgtggatatagcaagtgatagcatagtgttgtccgccaggccaatgtcttcggaagcgacaacaatcagtcgtcgagaaatatacagggggtcttcaccggactgaatcatgcgagcaaggtagtagagggctgcatctgggttgctccctcgaatggacttgtgaaaagcggatatcgtatcataatgctgatctccggcacggtcatacaccagcgtcttggtcaaagatcgtttcaggtcctctttatccattccaggtctttttgacagatccatggcaagctccaacaaattcagcgaagtgcgagcatctccatcggaaaatttggcgagatactgaaccagctcttcgtccaccagttcggagggcgaataattcgggccttcaactcggagagcacggtgaaggattgaagtgatatcctcgtcagtgagcttcgcaagagtaaatgttcggcaacgtgagagcagcgcattttgaaccttgaacgatgggttttccgttgtggcaccgatcagtgtgacctggccgctctctactgggcccaagaacacatcctgttgtgactttgaaaaccggtggatctcgtcacagaagataattgtttttctcccagtgagtcccagctcactacgagcttcggcaaatatcttcttgcactctgctacgccgctgctggtactgtttatttccacgaatctgctgcccaccagcgacgagatgactcgagcgattgttgttttccctgttcccgcgctaccccatagtatcatactcggtactcggtcctgttcgatgagtccgcgtaggatgccgttcggtccgacaagttcttggccgcagacctcatccagggttttaggtcgcatgcgttccgctagaggtgctgctttgtggaaggcgttgatcctgggacgctttgcctgcggctctttggattcaccatttggttgcttaagcacatctcgctcccgtgtagattctgcttcctcggtaaatgatcgcttgccggtgagagcacgtggggttgttgtgggacgcgacggggacaccttcggaatattcgactgggcagaagctttgcgcgcggacggaggttgaaacatgcttgggactggtcccttctgagaggatgccggctctcctggagaagacgacggttcttcgatgaagctctggcagcctgagtcgatgtggttattgatcttcaattgggagacagattgatcgcatattgggcaggaaaccatgatgaccggagaatgatatggtcattcactagattccaaggttactcaaagacttcaaggtgagataaacgtcgaggcgataacatccacccgcgggtgcgacgcgttcaacgcgttaattactaagtaagaggccttggtgcctgaaaatggggcaaatgacagatctacctaactgtatgaaaacatgacatgtagaatatgtagatactacatacatctactcaacaagtacatgcaagtactgtataatctccgaatgctccgaatataaaatcaagtcccgagggccgtcagagccgaatgcggagcacgccatggtggggaaatccgacatctctatctattgtcctctctcctcttattcccttcaatatcgctcatgatttcccgctcctttcggcacatccttgctcaatcacagaattgcaggtctagaacccttctctctgccctttcgacattaccccgccctggttacagcacaagagcgatgtcggctacagcttcgcgacccgatccatttcgccccgcccagcgggtggcaggacagcgccaggatgtttggtatgccgtttcggaaaagaagttgggaaagacatactaaactgagatccaaggtcaatcgtcaacgaagccgccgcagcttcgccagttcagccgattgtgaacatgggccagggattcttgtgagtcacaccatttcgaggacccccaattaccccaagggatgggaattgacgggaaatatttgtgcgcagtggctataaccctcccaagttcgctcttgacgctgcgaaggctgcgctagaccgagtggaatgcaatcaatattctccgacgaaggtagagaacgccaacgaatctgcgcatggttacacaggtgctcatacattatagggtcgcccccgcctcagacaggctattgcggatgcttactcgcccttctttggcaagaagctgaaccccgagaccgaggtcacgatcacaaccggcgcaaatgaaggtgagagatcggcatagtttatctataaatgcatacttggcactgacaagcgacgaaataaaggcatgctcagtgccttcatgggcttcatcgaggatggtgatgaagtcattatcttcgagcccttttttgatcagtaaggagctccaacaccgcgagaggattgagcggatactaatttactcggaatagatatattagcaacattgagatgcccggcggtaccatccgctatgttcccctccacccgcccaaggatggtgccaccaagacctctcctgcatcggagtggactatcgactttgaggagctcgaaagggccatgaaccccaagacaaagatgattgtaagcatgcgataccaagattctcatgaatatccaagctaattatagcaggtcctgaactctccgtaagcagacctgatttacagagacgaataaggtctcaactaactttgtattcatagacacaaccccgtcggcaaggtcttctcgcgcgaggagcttgagtgcattggtgaactgtgtgtgaagtacaaccttatcatattgtctgatgaagtctacgaccgcctcttctacgttccctacactagaatcgctaccctgtccccagagttgttcgagcgcactttgacagtgtgctccgccggaaaggctttctacgccactggttggcgtgttgggtaccttatcggccccgagcacctgatcaagtacgtgtccggtgcgcacacccgtatctgttacagcagtgtgtctcctctgcaggaagctgctgctgttgcttttgagcaggcagagaaagagggcttctgggacgagagccgaacagatatgaagggcaaaattgagcggttctgcgaggtctttgatgagcttggtatcccggtatgtgattattcacccctatgtgccaagtctactctcccatatattgattttgctgacatcaatctctccagtactctgatcccgagggtggatactttgtgcttgccaacctggcctctgtaaagctcccggccgactatccgttcccgccgcatgttgctagccggcctcgtgatttcaagctctgctggttcctcatccatgaggttggcgtggctgctatccctcccactgaattctacacggatgccaacgccctcattgctgaggattatctccgctttgcggtgtgcaagaacgatgatgttcttgagactgccaaggagcgcttgaggggactgaagaagtatatcacccagtaaacaaagacctataggcctttcatatgtgagaagtgacgagatatgcatagaagtgttatgatgccaatagaaaatcggatataaaattgcaaaatatgtgcacaaaagccaattctttcccacagggcaggagtggtctgtctaattgagtcttttcctacttggttaattgtaaaatcaacattcggccaatgatgccaagttcattttcgatcacgtagcagccatcgtcgttggtaacatccaaactcagctatatatatatatctttccttaatgatcaatctactagtacatccatatttactcatgtacagctaatcctacgtaacttacggcacctgagaacaaagaaccaggcacagtagggcaaaggcacaagcacacgacggtctttgtttcaatctagaaacaacgcagggggcgatcaactccccctctatccccacgccactaccaagagcgtaatacaaaaatgggcatcctgaacctggggggcatccaccgactgaactgataatatctctctccaaaccagctaccccaggtccaggaccccggtataaacaattagggctagagaggggacggctccctaccctgaccccggcatctccagctccatggggcccgctcccaccccgtcccaaccgataccacggtggaatgtccgccggtcctcggacaggacccccgggaatcctccgccacgcgtgcgagccaccacgtcgctcaccgatggatgggtggctcggtgcgccctcagaatccaatacttggattcgagggattcgcacactttccggaagcccaaacccatgtcgtggttaccgagcaacgttgggcgacgctcgctcgcgcagatcagattcccgcagtggcgtcggtcggcaccgatccactccgtctcacaagcatgccgcaaaccaagacggctctgatcgatggcgccacccatctcgagtcccatctggtaacgcagcatgctgtccatgtccttgtcactggcccacatattgtgagcccgcatccagtcccgtacaagccggtaaagaaagtccactagggctggatgttcaatcgccgctggaagagaaaaagagttagcatatgatctgaaagttaggcaatggtgagggctgtatgatatcaaaatgcaaggaaacagagagtggcgtgaagctgaaggtgactcagagtgatataaaacttaccgaagagacaaattgcaaggcaccggcggaaccggtccttctcttcggcgtcctcgaaccgcacaatatgtgcgattcgaggtgaacatcgcagctgcagatgactggctggatcgtcctcaaccttcaccaggtcgtcccactccgcgaacacgaagtagtcacctcggtcgcgggcagaactgaaccacagcgcctgacgatggcgctcaggtttgtcccactgatgaaggttgggaagcattggtggacccacgagaaggtcgtgagagatcgaactggccaagcactgttccaggaccgggagctgcgtacaaactacccagtgtctcttggcatcctcccacaggtggtccttgccgcagtagcggaccaaggaaaacggtccgcacttagggcaaacaacggagaccccaacccccagacaacagagggcttcgcagaatggctcatggcaagtaacgccgagcgtgcgcaagtctaacagtaatccagggggtggggccacggtgttgccgaactgcttgactgtgggagtcagttcattatcctcagacaactcgggtggagacggagaatgaccttccattccattggtctgagaagaagcaggagagacggggagctcgacgtccgcatcgcgagcttgctgacgcttcatcaattcccgaagcttccgtttaccttgcttcttctttttgtagacaatcctcttgccgggtcggctagactcagctgaagtttggtcatatggctggatggcgccatctgaactgggatcatctatcccaaactcagccgagtctgtggtagacagggcagacgaggcacggggggtcaatggagggtcggtcgtttgggacgaggatgtcatttcctggcccctgtagagccctatggttctcggttagcttgtcttcaagtaaaaacatgtataaaaagtgattgcatacctagactggccacactaaaagactcacttcgatgcaagaccggctcctgcgcctcgtggtcgccatggtactcttcagggtctatataatagtcaacaggtgtatcaacatcgatataaatggtaaagagcttaccagaaaaccataccttgtccctgttgttcgagacagggcaccgaagcccagcctcacctccctgtggagtcaagaatagctcatctgaagtcgctgctggctcgttctcttccgcttccaccgactcttcgccatcatcctcatctattctccacaaggcgctcgtaggtgtgcagaaagatgacattgtggataaggtgaggtaagtacgaggggagaggtgggttcgagctgtctcgaatgatggagacaatggggcagtcaagtcattgggcgtagtagggaacgcgggatcgcttattgtttgtgtttgttggccagcaactgccgcaagttgctgcttaatcgggacttcctgtagagcgatgccatgcactcccggaagtaggtcgccacgctggtcgctgccgtgctggtcgctaccacgttgctctgtaatacggtctgtgatgcggcctacattcttctttcctacatccctctttcctgtgttggagctagacaaaccaggcgtgcactttccctttccctttcccttacacttgcccttgtacctcttgttgctcttttgagtatcaatcgtgagtgcagagaccttcttggtcaactctttctgggtcgcctcatgctgggctgactcttgttcagtcaactcatactggttcaactcatggctcaacttatgttgggtcgcttcttcctgggttgcctcttcataaggggcctgtttctgggtcgacttttgacttcccattgtctctatcgtatgttctcgccctagcaatgactgttctggatgtgacataactgacgcatctggcttttcttcctcagagttctcttcttcgactgtggaatgctcggggaccctctttggggatttctttgatgccttattccctttgatcttcttctgaatggagaaacgggaagtttcatcgacaagcaacttgtcaaacagtttgttgtctatgtcttttgtccttgacatcagccattgaatgcgcagccaaatttggaccggatatgccatccatttgccgtaagtgttctgtgatttgttagttaaagccgaagaatatcggtgaaggttttatactgacagggtctttcttagagatcttttgataaaacttgtcacgctcatcaacggtgacgatcatctgctctacaggtcttctgatcctaccactcacgaacttgaacttcatggtgggcaatttctctttcgctttcatccaacttacttggcagctggatgtctcccatggagttgtccatttgatatggtaactatgtctttccatgttctttgactctcgaagagccggtgcaggaccagtctcgatattgctcatggcaatccttttggggcactcgaatagtgcctcgatcgagcccataatccccatcatgccgtctgggtaattgatggggatcctgaagtcaacgcggatgatctcggagttttcaatgccggcctcaaggtcgcacttgaggttaccattggggttattctctatggcaaatgtcagggtaggggtcctccagttgtgaatcttcagtctcaactgcccattccccaaagtgatcccggcctgtctatccatccaattctctgacatatgtcgaggtgttcaaaaggctctctttagcctcgagtggttctcgaggttgttaaggaaggtacctcgctgcaggatacgtcagtcaaatgcaaggtgggtaatccgtctttgcaagatcggtcttcgagatcgtgaggagatgtgatgacgcctccaatatagattacttaccaagatgtgtccttgggatactggaaagctgtaagtctgatgtcacaggaaatattgtggaagctatcctgaatcatcagccaaggtccttgggcgttggtgaagctccaacgcgtgaaactgcgcgagaaattactttgtgagttttcaaagcgttgatagcatgcactatgaggtgaaatgagcttttgttctctgatacaatggtgttgatccctcaaagagatggggagggatatgcacgaaccaaagctattgagtttgcggggtgggaagggttgaagggaagaatctcgggaagggaacaggatggagagaaagaaagacaccaaaaaaggataggctctgaaatttgacaaagcaaaaaatggtccaccttcgagcttcgacaacaatcaacaatggatacaaataagctgtgcacgtgctactgccactgagccttcgaccggtaattgacactgaccaggcgattgggacagaaatgaggacacacacatgtaactcatcccacacagttcaaggcatttgagcataagttcgaagctcttcgatggtgtcttcaaaaggctccgattgctacttatgctgtgggttcagagcctcaaattgaatctgctccagaacagaaaattatgtcgatttcctacccaaaagaatcaatacgcaatacgaagtattgtattgagcaaacatcccgataccacctatgagacttccttgtgatgccagcgttatgttccttccgcaccattcaaactatcagcgatagatagcctacgggagcaacttctggtcgaaactcagctacactaaaacgaggtcaaagaactgacatggaggctcggaggaggcttcacgacacgaaacaagcatgatgtccttcagttggtcttgctggctatgggtctccaacaagagcaacttctgctcaacacctgccttacaccagaaacaaaaaaaaaccgacatggagggttcaagacgccaagcagccatgtcctcgacctgagcttttgctcgacacccaactaaaacaaaaacgatgtcgaaaaactgacatgaaggctcggaggaagattcggggagcaaaacaagcatttccttgaactacttttatcatctcttagctataggtttagggggatagtttcatatctgaggcgaatggtgcttattgtcaatcttccttacgtagaagtcacggaaacacacctgaagcatactccttgagaagagattgaaaaatataccacggaaggctagtagagtaatcaaagattattgttgtattatacataaacaaaacccaagaggtcaaatgggagctcaccttgttgcgtttgcaagtcgttagggtgcgagtctgtcacgtgtggtcacgtttcttaccgactcagtgaataataacacgtgacgcttctcttcagcgaccacaagtcaaataagcatcgaggacctatttcacacactgtaccttttggtggactggctaaataacccattattacgatggaacatattgcaatatgattacttatcgttcgattaccaaaagttgtatacatggaatttatgctctgcacttgagtgggcgagtctatgcatcgattcacaccaagtcaccgagttgagcggcaacagccatagcagaaacaaacccccatagaaatgccaacaacatacgtctcatctacctacatgacacaggataaaaatatccgtacggggtacagacatgatgttagatcaaccagccctcgctgtccggctattggctctcagtcgtgggcggctaagcgcccatggaggctatatttggctgcttgtccactccggcgctttcgacactcacagtagccagtgagatgctttgatacttcatgaaacaaaccgttgcacagaccccttgtcttcaggctttatttttatattttctttgtttcgagatggttatggttcactctgattggggctgtctcgactatacggggttgccaaggtccatgaagctgcttctttatgagcaacattgggctaatgtgatgtctgctgccgcccgggatgctgaccatttccaggtgacgttcgtcgcctgctatatttgaagattcattgtcccttgttttattctggttctattgttctcagtccacccggtctattcatctattgatgccccctttcattcaacgtctataagaaatcatatataccatgtccttccactagctcgactttttcctctgctctctttatcatcctttgagaaatctccattttgatgcaggctttgcatatttccttgatccaactacacctccaaacattcctggtcctcgctggacgatatcacgcctgaaacatttgacaaatataaaaaaagaatccttacaatggtattcactcgaaccggtcggtcggtctttccactgctcccgccttatggagctcacgattcaagcacggggcggataattcccctacatccagatggcctcactccctatctcggtctgcaagctcggctttcacaagtatggatcaatcgatggacaatacttctactgcttgttctcttccgagtgttgattgcagttggcgacttgcagtccaacatggcatccgccaagcgtgaggcgctctctgcatgcacgtcagtggagtctatgggtagcgcgatggcgtcaatgccatactatctatccaagggtaccaacgagcttgtggcttcctcggttgatgaggctgtttccgccctgaagtccgtgttgttgttgactatcacgggcgtcggagagattctatggttcgtcatcaatatgatgtactctacctacgcctgtctcattacgatggccgtccgtggcacggtaggagccggcattgaattgatcaaggaagctactgagtggatcaacaaaaccctcacgacaatcagtggtgacattgagagtaccgtcgacaaatacaaggacgaactcaactcatttctcgagacaatcaataaagttgccagcgtattctcggacgatcctagtccaatcgacctcaacagctcaatcactacgctggagaatctgtctcttccgtcgtcagtcaaccggacggtcgaaaaattagacagccttgtccttcccaacttcaaagagatccagaattacaccaagactctcttcgaaacgccctttcaagaagtcaaaaatttggtaaatgaaactttgggcacttacagttttgatcggtccgctctcccgatccctgccaaaaaacagttgaccttctgcaacgacaacaaaggaataaatgatttcttcaacggagtcactgcgctggcactaaaggcacgccaaatattcattattgttctcgtcattgctgccatattggtgtgcgttccgatcgcgtggcaagaaatccgccgatggcgctcaatgaaagaacgctcccagttggttcgcagggaagcccacgatccaatggacgttgtctatattgtctcacggccatataccgcctctgcaggcatcaaggcagcaagtcacttcagcaacagccggcggcagatcctcgtgcgatgggccattgcctatgcaacatccatgcctgctcttttcgtactggctcttgcattggcagcactattttcttgtctgtgccaatacctgctcctgcattcggtgaagaaaatcgttcccgcactgagtgccgaggtaggagaattcgcagacaaagtcgtggacgcactggaaagcgcctcaacagattgggctaccgatgcaaacaaggccatcgttaatcttgacaccgacctcaaccacaacgtcttcggttgggtgaacagcagcacgcaagccataaacgggactctcaacttcttcatctacaacacatccagcgttctaaacgagaccttcaaaggcacccttctgcaagagcccgtctacgagctatacgagtgcctcatcggcctcaaagcagaggccctccaaaagggtctaaactgggtagccgagcacgcacacatcacccttcccactctcccgaatgatacattctctgccggtgccgcctccagcataaacgacacctccaatccctccgatagcttcctcgccgatgcaggcgatcaaaccgctaacaaaatcaccgaggtcgtcactagcgtgatcaacaaactggaagcaggcctgcgaatcgaagccatcatcgccaccatcattctcttgctttgggtgttcatcgccttgattggtataactcgcgctatgatgcttttctggacgcgcgacaaacaccgcggcgagggaggcaagggtcatatcctagattctgtgcctagaggcggaccaccaccccatgatgcgaatgggtttgctgaagttccactcacggctattccgaggaatatgtctgcagatgggcatgttgctccccagtatacggcggcggcaccccccgtgcccgtgcggagtgagccgtcgtcatatggtaatgagaaggttggttttgcaggggaaagggcgttgcagttggactcgggtcctgatctgaggggaagtagctatgttgaatatgatgtgaagcgatgatgggaaatatattcccgtcttcttccatcttttttttttttgatcttcgctattctcgagaggactatgctctttgtcctccccctctctctttgtgtcatctctggcatttcattggacttgccttggtcatttgtttccatatgtggggtgttttctgtcataataattctcagtagaatatttgaaatcaagaatgccacttgatttcaaaaatatgcaagtcgtgttgaacatcatcttaaatcatatctcttctcacatctcatacaaaacaccttacgagatcggaattcataaacaaagatagaaaaaatatcaatgtactcgtctgtctggatatgctaaacaaaaacccgagaaaggcataatctcatacaaatcgttacaaatgcacaaccactatatggcaacaaagaaactcttttccccctccttaggatgcactctcacgcgctcgatgatcggatccgcacaactaacccgaatccgctcgggggtggcaggggactccaaagagagcacgtcagtgacgttccactgcttacgcgccgccttcaaagcgtcacgaatagcaaagaagaccgcactacccataaacaagggcggctcgccgacaccccgcgagcgttgaatcgtgcgcaagttctcccactccacatccttaagcaaactgacattgaagacctgcgggatatcacggaagccggggatcttgtagtttcccgggcctctggtgaatatctggcccgaggctcggtgccagagactctcttcggtggtgaagagaccttgtccttggacataggcgccttcgatctggccgtagtccactgaggggttgatgctgcgacctacgtccatctttatgtcggagcgtagaggcgtccagtcaccggtcagtgtgtcgatttggacttcggatgccgtgactccttgcgtgaagtagaagaacatctggccgctgttctcgccccatacgtagccgatatccggggtgcggtagtagccttgtgcggagaggttgacacggtcgaagtaggctgcgtgggctagttctttcatggtggcgttgggcatcttctcgcggaagggacgtaggcgtttgtttaattcttcacaggcattgaaaatcgcgtagccgttgagatcggagcttgccgaggcggccgttgaggaggcattggccactgtgttggtcgctgtttccgaaatgaagacgttcgactgcggcacttgcagtgcttcggcggcaatcatggtcatctttgtgtgaaggccttgtcccatttcaacaccaccgtgtgctacgaggacactgccgtcgtggtagatgtgaaccaaagctcctgcttggttcaagaagagagctgtgaaagaaataccgaacttggttggcacaatcgccattccgcgtttggaccacttgtgctgcgcgttgtattcctcgacagccttccgacgctccttgtaagagctctcctctagcacttgcttgtacatcaaaggcacgtgccaatctttgagaggctggttgaaatgcgtcatctcacctgccttgtacatattgatggcccgaatctcttcggccggaatatccagacgatctgcaatctccgatatataacactcggcaaagaacaagccttgtgggccgccgaaaccacggaaagctgtgtttgatactgtattggttttgcagacccagccgcgcacattgacattcggtattttataaacgttatcaatgtgtgacaagcttcgctccacgacagcaccggatagatcttgcgtatgaccgccattggcgtatacatctgcatcaagagcaaggagttttccttctttcgtcacaccaaccttccaatggcagaggaacgggtgccgctgaccagaagtcaaaatatcttcatcacggttgagcatacatcgcacgggccgtcttgttttcgcagcgccaatggcacaaataccagccagctggatagatcgagactccttgcctccaaagccaccaccaagtcgcttcacgcgcgatacaactttgttcgcagatactcctgtcacctgagcgacataggcttgtctgtacacgcttagcttaaattctgttataagacagagtcaaatatatcgctactcacgtttcgttgggattctgggtaccactccaaatctccatttcaccatcctccggctttggaatcgccacacatgcttgggtttccaggtagaagtgctcctggccacccattcgcgagactccagtaaagacgtggtcagcttttctgaacgcttcctcggtatcaccatttttgatcgagcgatagtggtcaaagaaagacttcgcctcaatggcctcctccatcgtaaggatactcgggaggtcttcatattcgaccttgacagccctcataccttcctcggcgattttggcactggtcgctagaatggcaccaatcggttgaccagcagtaaaaacttcatcgacggcaaagaaaagctcatcggacttgggttgtccccaccaatttgctttgggattcggaagatccgtgtggttaatgtagtctgcaacacctggaatgtccaatgcagcggacgggtcaacgctaaggattttggcatgaggcttggtggacagaaccatgcacgcgaataactcattctgttgcacaggaatgtcatctgtgtattgagcctctccggtggactgcttcaacgccgcaacatgcggagtcgctcgtccaagaatcttctgttggtaggcgacagagctttcaaggtctttagctcctgtagaaattgctctttcaatctcagcaacaacatctggatctaaatccgaagccttgacatcgagttctgaaagtacgtcgtagtaaaatctgtagaagaatcccagagccaaagacttccgataactagccataccaccaggaactccaaatggcaggttgaaatcctgctccagtgcgctcatgacaccctctagagttgcggggttcgtgaacttcttgccaaccaaaaacgcctcggcattctttgctgagacggtcatagctgccatgccaccaaacacaagattggcgctgaccacatcattggtcttagaaagagtcacgcgtaaggcggagttgacaatggcaatatcatcgtccttccgcttagattgcttgtaggctcgaatgtgctctccctgagccttcgcggctggaatgcgcaagctagcaatgatcgcgttgggagcgagggcagtctttctgtatccttggaagaattcggtcattggaatttcagtctctccttcgagggattgggccacgaggatagtgttagtggctaccaaaaccggattaagatcagagatgggcgatgcagtggccaggttacccgccggggaagcgacgtttcggatctgtcgcccagcgaaatagagcaactgcttcttgattgctttgaaaggttggcctctgatatcgccgtacttttctaccgcttggtcacagatgtgttcgaggtctgttaaagacacatttgcgccgatctccagatagttgtcgtgcaaggtatattgtcgcaattcggggatatctcccaggtagacggaggccgcgtatcgcattgccttgaacttaacctcaatctgtgtctccgtgcttccgccaattagtttagcatctgggtggacgctcttgatcagcaacaattgctcgacggtcaccggtcggtaccacttcttcttcttgttgccatatgccaagggtcggtattcgtgtttccgcagggcgacagggaagatcaactctgtgtctggactgtacggcttgaattctggcgcagggaacttgtaatcgacagtctcaatctcgccattcttggtggaccctttgcagcagccaccggatccatttttctccatacagcagcccgaaccaccattcgcagaggcttttccgcagttgttggtcgagttgaagctctgggcagcatccagaataggtctgtaacccgtgcagcggcaaaggtttccatcgaaggcttcttcaacatcgtgttccgagggagatgaattgtttcgtagcaaagcataaagagacttgaaattattagtcaacctcggatcccttcaaaaatggaagccagcgaaaggagcataaaggcgtaccatgactattccaggagtacagaaaccacattgacttccattgccgaccgcaatccgctgctggatggcgtggggatctttcacattcccaatcccttcgactgtgataacgtgcttaccatcaatgctaacgagtggagcgatacaggcattcacggaggcatggtagattttcttcgttgtcggattgatatgggagacgacctattgacggtataacgctctagttagcactatgtatatgcataacccgatatagttgactgaaacccaccacagtgcaagcaccacagcctccctcggcacatccgagcttcgtgcctgtcaacccaataccccgcaagtattcgagtagagtcacttccgggtttatcgtgtctagtgcaaccttggtgccgttgagatagaaccgaatagtgtcatcccagtcctcagtcaacgcagacaggctgatgggcttctcgactgcgcccgtggactccgtctccaggattcccggcgccatagtggaaatgtggggtaccgataagtagagataagctttcaagggcgacttgagatgcgcatcttttagaacgagttggcttcgacgtggatatattagtgaagtctcgagatgtcagtattgtaggaggaaaggtctagatgaaatcagatctccaaaactcggtaatcaaaggtctttaggtccaaggtttccaaggtcgttatctatgcggggatcgccactgtccgagcagtcggatgaccatcggattgcgcgttggaccaatagtttggctggaattactagttgctaccaacagtatgtacagagcacatatttcacataagctgcatgtagacagctagtcagaaatagaatagacagggccttgggattaaatggttgggaacaggcagcgggagagctttcccatctcttccacctttgaccttttctatcgcgcccatggatgcccagtcttggtaaagctcttatcatacacagtggatgatttggctaactcacacaacatagatgatctaatttggcgacaaatgtatcgccgtgacgaacgatacgctgctaaacaagattcgtccgaccgtacaccgcttagaactcgcggagccccgttttggacttccagaaagagtcattgtcaagcaacaaaaagacgaacgggaagctgagttctgcagtgaaatatcttcctatactaagttgcagaagcttcaagggactgtcctctcagttctattttggcgaaggctctttcaataggcgtcaggccttgatcctttcagagattgaaggcattactctgcgcgagctcgcgaaacaagtcgaatcaaatatcgaagaggagactttggagttatctcttgagaatgctttcggggagtcttacaagctcggagctgagcattatgacctgaacctaggtaattttctgttctgtgccaatggacaagtggtggttatcgatcttggagatatcgaatttcatgatagacagcaagcttgggaactcagcctcagtatgggctgtgcgtactatctgatgagcagattcagagatgtgagatatccaggtcgtcctccatcacctgttttgtactcagaaatgcctgttgccttgggttgcacggggcctatgagctgctgtgggagccttaggaaatcgaggtttgaacaatagcctgcaacaatcccatatcatcggctgattctctcaatattcgcgactattccgaatgggtcgcttgacgtggagggctggctggggcagtaggcaaaaagtggcaaggcatgagcactaaaaacttcatacgtactccgtaggtaaggcttgaatatctgtccagttaaatttctatatttgaattacgccaaccaaaaaaaaaaagaagctacaatacatatatgaaagaaatggttcgtagatggtatccccataaatgcgcgctcacggtctcgagccagcaaaaggtttctcttcatcttcccacttctgccgttcaacgacgcttcgagccctgtagaatgcgggattagcaacagcctgtgagacattagatacaaggcaacgacttaccgataggccttaacaaaacgccaaacctctgtgtctgcaaggttccaagcctcgacaacatctttgatattgatgccggtcgtttccttattcttaattatctcgcgggccttttggatgagttcatattctttgccgactccttgctcgcttggcgtgttatcctgcgcactcttggtagactctatgtcgttctcagtggccggatcaatcttacccccacgagggatcttgaagccaaactgccattcaaactcgtccaagagctctgccggaagactctggcctgcctctgcaggaagagattccactgtcatccacaacgaagttccgacagcatcttcgcctgcgacaacctgcttgaagatcactccccggtatgaagagcccaattcgggcccaaggtgttttttggtcacctcagagagccatgcgtcgcgctcggtctcccggcgaacttgtgctgtagtgatctgctctgagttcctctgaaggctgataagagtgtagggatgaggaagggtgccgatggtgaacaagaaggtggtgtttttataggtcgaaggctggctgatacgcatgggttgctttgcagtcccagacccgcatgggcggcattcggggtcattgggtggacaggagtcgggaatgggcgactccgggcactgaataagggcctttgccagcctaagagcaggctccaccagggcagtagtgtgttgagggaacggcttcagcacagccagcccggcggggaaggagctatggaatttattatggaggtgggcgttgatcagttggacaagagccaactgaccactcgcagcgttctcggtcatcttttcgtgcacggcagagtagccagaggtaatggctgcagatttgtagaacgccaaagcggtcggcggctcaaccttgaacgattccggatcaatcagatcaacgaaggactgggttttatcatcgagcttcaggactgcgctttgaacggctgcatcaatctgcgacttttcagccgcgtaaaggccattcttaaggttttcaaatcgggtaatggactctgggatactcccccgccgaagatacgacagcatgaaatcatcataacgcgccatggggaagcagtggaaatccgcgagcaagcccgtgcccatgtgcccccacgcaagccaggcgaacacctcgttctgagttttgggcgcgagtttccacttctggacaatttcgtagttcgggttcttcattgcatcgcccggagtcaacaccacaggcttgaatccttgcgcgaaccatgcccgacgccacgcgaggagcaattccgcatcggcgctctgcaattccttgagatccttgccattggctttgttggggttatatttcgcatcgtagtatgtgtagatcggtcgacgttcgcgaaggggagggaggacggagcgagtctcatccaacgtgatggcagaggagaatgggttcaaccattctagggtgctgtaccatttcgactcgccgtgtgtgctgttgttctgttcttcgggctgctcatgggagggagggcggaacgagggtaggtggaagttgcttaatgagggtagctttggtgtgggcacgaacttggccgggcctgtggctggttgctcgccgggatcagggatcggagatgacgagaaaatgaagagtaaaagcgcgacgaacacaattacagacaggagggctgtactcctgtgaggaatcatctttctagcattcaaaccagaggacctgtgtagaggcccgtcaaaagttgagaaaacacgtgtgtctttaaactgcgacacttctcctgaaactccacccggatttggccaattcagtcttggcgaaagaatgacgataggtatgaagagaactcagcacaacttctatctgaatctcttgctcagaatagaatccactggcttctaatgatgagccaaatgcaaaatagaacctttgataacaattttaggagctaggacggggatggtagttccttactttgagatcaaaaagaaatgatgactcagcgagcctattataaatgacctcatagaatgagacctgtgaacctctacgacatagaaactcttaacaaccagatttatgctcaaaatattccggtatctctcttaggatgatcaagatactttacaattatgttcctgatcatattatattgtgttcgtttacaagcaactagtaggaacatatttatgtcgctgtatgtagctttgatctaaacccgtacagctagtgatgtgaaggctttgcaaagtgagatatacatcaaggatattccaccaagttatccacacatatcttgggctggcatatgttatgttgtatgttgtacattcgtcttctgtctatatgccctcttcaccagaatgagacctctgcgatagttaaatgtctactcttagcaccccaagaatggctgtatagagcaaaatagtctcaacgttgtcaatgtgagtatccaatggaggaatcagacaaagggaatgagtatacgtagatctcctgtactcctccagttctgccaatctgtgccgctcttggctggaaaaaccttaactccgacgccaccccgctgtccaatcttggcaggcggtgaaccctctgtggggaaaacagctgatcagcgcctcaattctcattggcagaaatagcggcgagatcggacttttccgctcgttatgggggggtaattttaatattgagtcaccgtatcttccattctccaactcttttgaatatactgcaatcatggctgtgggaacagcctctttgcaggaccgcctggagatatgggcacaaaggttgaacaatctgactgtttccccattgacccgagattatcccgatacaaaagagaccgacggcaagagagtcattgaagcttttgagtctctgcgattccccaaggagaagcttgaggcgtcgtcatccggattcaccgctttcttaactgccttcattatactggtagcgcgattgactggtgatgaggacatcgctgtgggcacaaactccagcgaggatggccgtgccttcgtcatccgagttcccattgatgcctcggagtcatttgcccagctatataccaaagtagacaaggttcgtatatattttacttgttataggattcactactaaaagccttgcaggcctttaaggaggggtcttcccaaatcgtgcccttggtcagccttcgctcgtatatacaggagaagtccaagtccgaacgcaccccggtcctctttcgattcgccgcgtatgatgcccctgctgcctcccaggattaccctgcaaacaccttcgataccactgatttggtggttaacgttgcaccgggttcgaccgaggtcgaattgggcgcatactacaatcagcgtctcttctcgagtgcccgtattgctttcattttgaagcaactagccagtatcgttcgcaatgctgctgccaagccggacgaggctatcggacgtatcgacttgatgaccgaagatcagcgcgccctcttgcccgacccaacatccaacttgaactggtctaagttccgtggtgccatccacgacattttcactgccaatgcggaaagccacccagacaagctgtgtgtggttgaaaccccgtcaaccagctcccctcaccgccagttcacctatcgccaaatcaacgaggcctccaacatcctcggccatcatttagtacggtctggcattcaacggggagaggttgtcatggtttatgcctaccgtggcgtggacttggtggttgctgtcatgggaattctgaaagccggtgcgactttctccgttattgaccctgcctatcccccagaacgtcagaacatctaccttgatgttgcccgtcctcgcgctttggtgaacattgccaaggctacaaaagatgcaggtgaactttcggacatcgtgcgtactttcatcgacgaaaatcttgaactccgcactgaaattcccgcacttgctctactcgatgatggaaccctcgccggtggatccgtcaatggtcaggatgtattcgccaacgatgtggcactgaagtccaagcctactggtgtcatcgtcggccctgactctattccgaccctgtctttcacgtccggctcggaaggccggccgaagggtgtccgtggccgacacttctctctggcctattatttcccttggatgtctgagactttcaagctcaccccagacgataaatttactatgctgagtggtatcgctcacgatcctatccagagagacattttcaccccgttgttcttgggtgctcaacttttggtgcccgctcgtgaggacatccaaaacgaaaagcttgctgaatggatgcagaagtacggtgccaccatcactcaccttacacctgccatgggtcaaattcttgtcggtggtgcctctgctcaattccctgctcttcaccacgcattcttcgtgggtgacattttgattaagcgagactgccgctcactccagggacttgcgcccaatgtcagcattgtgaacatgtacggaacaaccgagacccagcgcgctgtcagctactttgaaatccctagctacgccagccacgagggctacctcaacaatatgaaggatgtgattatggctggtcgcggaatgttggatgtgcagatgctggttgtcaaccgctatgaccccactcgtctgtgtgctgttggagaggtcggtgagatctacgttcgtgcggcgggtcttgcagagggttaccttggttcccctgaattgagtgcgaagaagttccttaccaactggtttgttcagcctgaagtctggacagagaaagaccaagccgaatctaagaacgagccctggcggcaattctacgttggtcctcgtgatcgcctttatcgcagtggtgatctaggccgttacacgccatctggagatgttgagtgctctggccgcgccgacgaccaagtgaagattcgtggtttccgtattgagctcggagagatcgacacccatctttcccagcaccctctggtccgtgagaacgtgactttggtgcgaagagataaagacgaggaacccacgttggtcagctactttgtacctgatatgaacaagtgggcatcatggttggagagcaagggccttaaggacgatgactctgactctgagggtatggttggtctgctgcgacgcttccgtcctctccgcgatgatgctcgtgagcatctgcgcagtaagctccctacatacgcagtgccgaccgttatcattccccttaagcgcatgcctctgaacccgaacggcaaggtcgataagcccgcacttccattcccagacactgcagagttaagcgccgctgcacctcgccgccgctcatccgcggtgcaggccctctctgaaaccgagcgaactctggctgaagtctgggccaagctcattcccaatgtgacatctcgcatgattggaccggatgactccttctttgatctcggtggccacagtatcctcgcgcagcaaatgttctttgagcttcgtcgtaagtggcgtgttattgacatcagtatgaatgctatcttccgcagcccaacccttaagggctttgctggcgagattgaccgcctgctggcaatggaatcattcgcgatgagcgatgagaagactctagctgtggaagctactaataagccggacgacgagtactcgaaggatgctgtccagcttgtcagtgaactgcctaagacattccctcaacgtaccgagtctatgctcactagtgaacccacggtgttccttactggagccactggtttcctcggcgcgcatatcctccgagacctacttacccgtaagtctccttccaccaaggtggtagctctagttcgggcaaagaccgaggagcaggcacttgagcgacttcgctccacttgccgcgcgtatggtttctgggatgaagcatggacctccaagctgcaagctgtctgtggtgatcttggaaagccgcaattcggtctttcccagtcagtgtgggacgaccttgccaaccgcgtcgatgctgtgattcacaacggagctcttgtccactgggtctacccctatgcgacacttcgaccggctaatgttcttggtaccattgatgccctcaagctgtgcgccagtggaaaggctaagcagtttgcctttgtcagttcgaccagtgcgttggataaggactactacgtccaagaatccgaacgtatcattgccgctggtggaaatggtatcagcgaggatgacgatatggagggcagcagagttggccttggaaccggttatggtcaaagcaaatgggccggagaataccttgtcaaagaggccggccgcagaggcctacggggaaccattgtccgctctggatatgttcttggtgattcggtcaccggaactaccaacaccgatgatttcctcatccgtatgctcaagggctgcattcagattggccttcgccccaatatcttcaacaccgtgaacatggtgcccgttgatcatgtggctcgtattgtcattgccactgccttccacccgcccgccacgggcgttaacgtcgctcatgttactggacaccctcgtctgcgctttaaccagttcctcggtgcgctagagctctacggatacaatgtcccccaggttgactacgtgccttggtccacttccctcgaggagtatgtcaacgatggcgagcacaatgacaaggagtctcagcatgctctgtaagttacactcctatcggtccgttactgaatacaaactaaccttctttagtatgcccctttaccacttcgttacctccgaccttccctccaacaccaaggctccggaattagacgacgtaaatgcagccacagctctgcgtgcagatgccacctggtcgggcgttgatgcgtcagccggtgctggcgtgactgaggaattagtcggcttgtatgcctcttatctcgttcaaaccggtttcctgcctgcaccgaccgtctccggcgcccgccctctgcctgcagcgcagattagcgaggaacagaagaagaccctgttgagcgttggtggccggggtggtacatcttgaaatttataaaaagaagcacatgtacttatgtattctgattttaaaaagcatttacatttctcatattctttaccacccaccctcgtattcaaatgagcgattaaatgtgtggcttgtagagtacatatacaccggattttaggccgcgtaagttgggtttctgtttccgctttagtgctcatcccttgccgctttttgctcactgagcaccctgatcatcatataggccggatgaacggggtcccgaggtcccgaggtcgcccgctcactacggagtactgaggagccctaatcccactcattcactgagcgtgatctgatcgctctgacttactcactgagcacgactggattattgaagcggagggaatctacagtcgaaatgttccgaaagccccccaaaaaatagactatacactaaatccgttaaataaaaggctatcataaaagtttactatcttcacgtctcacacatttacgcactctgcatgtatatgtactataaacatatccaaaatagattcgagttagggccttcaaatcaatacacatgattgatcaatggcttaacacctaatctagtaggactggtgcagggagatcggaagactgtctgcgcgcaatcgaatgttcttctgtttatttgcccagacgcccttgcttagatcgagtctgccctcgtatggaacataatgtggagtttctttccttctgttaatggactcgtactagcactgtggcaactaagcggttctaggcagaccatgaaagcgctgggatcaaggatatatatgatcatgatttcccaccagcgagtcctatctcctcatacctcgtcagtcgatcgagaatacggataaaaccaaacctatattatcatccatcacgtcatcgatcaatccaacaagagaccatgaggaatcccacctgtccccaagatatcaagcccacccgcaccgccgacttccacgagattttggccgtggcaaagctgtacaccgacgcagtccggaccagcaaccctgaatgcattcacaaatccttccataaggatgccactatgtgcgggcacataggtcctgactttgccaatggaccagtcacagaccttttggaaataatgaaggagaagggtccagaacctagtttgatctcccacctgcatatcctgtcgacaacccctaccaccgccattgttgaagtagatgcagaggtggatacagttgggtttagagatcatttatgcatggccaaggtggacggacgctggcaagtcatgaccaagctttaccacttatatgagaagaagcgtgcttgagcgctggctttcttttgttcgagtgaccgatggattggaggtagtgcttgaatgtccgttatatgataggataccatcaatctatgtccattagaaatagcagccagaagttttgctcggtagattcatgattttgatgcagtatttcgtccaaatttatccctctataagcattactagcttattgctatccactccctgatccatcggatattttttgacctccaaagataattttcgctgacataaagtgcggaagtaaagcaagggggatcatcaccgtcaagagacggaaaaattatcctaggcgccgatattttatgcgagatgacccgtcccggcccgactctgtggttttgggtgagagatgtctttttccctgcgggtatgtctcccttgcatattgcatgtcatacactatatgcagtacaatgtagacaaatgtatgttatacgtatttcggagattctactggactgtggaccggtcaccctataacacatctcataaattcgatcattggggaaaaagcaagctttgtgttcagcgtgctgtatctaccacgtagaaagactatggcatgctggccccgacattgatattggcgccatacacagggcttgaatcctcgctgagcaaccagactatcgtccgagccacatcgcccgctttaaccaccgaaaatccttctttcctatagacctctttgacctcatcgctcgttttagccttgggcataaactgtggcagcaacggagtgtcggttatccctgtgaacaacttcttgttagccccatctagccgttctgtcatggaacaataagagctgtacctggagatacgctgttcacgcgaatcccgaatggaaatgtatctgctgccacgcatgttgtaaagtaggtggaagctcccttggaagttccgtatgcatacacatctgggatatggctcagtgctgcaatactacccacgttgacgatgctgcggtcatcagagggaagcgatttcatagcgcgaacctccgcacgggtgcagtagaaaacaccatcaagatttactttgagtaccttgctccattcctcatctccctcctccagaattgtaggcgagtttcggagcccagcaccctgggcaatgccggcaatgtttgcggccccgtgaaggttaccaaacttggccacgatactcttcacccatttttcaacctcagtgggcgaagtcacatctaacaaactgcagtgcacctctgtggctgggttgattttcttcatagattccttcagctcgtcaaagttcttgcaggatatatcgcccacacaaacagcagtagcaccgcgctcagctagcagtctgctagtggctgcgccgatgccagatgcaccaccagtgatggcaaataccctggatttcacggatgccattgggtcaggttgatttattttgatatgagcaatgatattcaaagtgaaagagaaagggttggagaatattctgagcgaggtattcgtgcccagaaacaaatgtctcccttcttcaatcataatgtagttacttctgaatcgtcatcccctccattgtgtacataaaattctgatctactggccgccagggccgtaagggacttgatttacattctggaaggataaaggatttcctatgtcgcatttctacgcaaggatagccacgctgggtagcattgcatagctagcttataaaaatgaagcgatagattttccgcaacaatatatcgtgcagtaaatggctggctgaacagtacaccgtaatttcctgatcctgaaagagcataccatgacacgatgcatcactcataaacacctcgtgaccttatagaggatgaaatatatagtttaggatgatattttgcatctgcattgcaacgtaagaaaactaaaattcagactattgattagcggagtaaaagcccatgcaacgctcttttcttgtgtgcctcatttaacttcaaattcaagccttgaactagatctgaaaactcatgtggcttatgcacatcggacgtctggaaccattcttctccgtgaagccggtctgggccatcagtaatctgaaagtggttctatcccgcttgtgatacagcttctacggcacttaggatctgtcagtaccaattaattagagatatacaggaatgaaaatagaaggactgtttaataactaatatcttaagattcctcaagaacaagatatcaaagctaacaggctggctacacccatttttgcttctcgtgctctgcaaaggtcctgaaaaaccttggtgggttccccgtcacttcttcgacagaaccgttgagagtttcctggggactatttttgacatcaacttccatcgcagcagacatagctgcaaaatctgcaggcattccaatttcgtcaaccagaatattggtatattctgcttccgacaaactgcgatgggtgattttcttgccgaggatcgaggtgagaatctccgcaacctaggatgtgaatcaagtcagttttgttcgtcaacaagaagtaggatataatcatcttacctgcccgtatgagaggagctctgggccttgaatgatgtattctgtcttatgcgagccccattctgtcaagcaatggaaagcaacggaggcaatgtcatcggctgagatgaaggggatcttgccctctcctgtcgctgatactacttgactctcgttcttgatccatgtccgttgggggtcttccaatagattctctgggaaacaaaaaacagtttagccactctatagtcctaagctatatgttagacaggatgaatcatacccatgaaccacgtcggcctcagtgccacatactcaactcctggtagagagtctagataggcgtggacctgacccatcgagtgatcgcctttctcaatattactggcactgacaagcacaaatcgctggactcccttagagcaagcaagaccaacgaattggatcataggtgggaccatgtccatggtagggggtccaaccagataaacggctgagatcggttgcaatccatgtttaccaatctctgcaaatgggttgtcccacgttgtcttttcataccagttgaaatgggaagagttgtatgggctttcctgtgaagtcgagctagatccaaccaggaatggagtttttgcagcatcaagaagagccgcaagacgactggccgttttaccccgtcccccaagtacaagaatagtcattgcaaaaggtctagatagtaaggcagtcggaaagttgtcttttgtatagctttcccttctggagaataattgagttggttacgagatattcagacaataagtactcagttgatagctcatattgaaccgtaaagcaacatgtgactaaaaatatgccggtctcacctcatgcttgactatgacgaattcaagtgcagatactatttttccttgtttgaacctgccaggctaatggctaaatgaggtctgcagctcccaggatcttccacaagtacacaaaatacggctccgccaattgaccgccattgaatatcaacatctcatgtatcggttgagctatgtataactagataacggaaagtataccaatcaggcggctatgacggaaacatgcacaatgcaagttagaactgatccttgctgagtcccatttgcgaagacttcctcgtgcagcgccaatacatcctgcattccaatttgagctcatgaagtcgcggtgggctagacgccacattttcggaaagtgatgcaacttttcatagtcgtggcaagctccaacccccttgcatattgaatatgtcgacacatcccatatgttgtagtcaacttggcagctcacgacaccaagcacaaaattcgctacacccaagagacatgtagtaaagaaatacgcgaacttcgaattccatacatttagggaaccccccggttttcaggtgtaccttcctaatcgggtacgtaccctgcttctgcctgccgcacataataccgccttccaatttaacataccacttttgtggcagaacagtaggtacctgtaatttgtatgtaaactgctaacagaactaagtcacttttgtcatattaactaatttattgtcgactgcatcatcgttaatggattaaaccctataggaattaggtagaatatacgtttatttctgatcaaaatgcatgttttttttactatgtataccagaagtgggcagaatatactctctacactggcagaaaatatggcagtattcttgatcgtaccgtattcggaaggcggtactgaaaattcaagggagcggtatcagctagatgttgctattcgaggcatgacggtatacctaggtataacgcgacctggaggattctgctacctatgtcaaattgtccgtgcaaaactccgcaacacaccatcaaagtctcgcttggacatttttctcctgacctatttcagccccctcaacgccctcttgcacccgcgtggccaattcggatgaaaccagagcgaaagtgcgatacaccttgtttcggatatcctgacgggtctgcgagactgattcgacaattctctccaccattcgatcctggaactcctgactccggaactcgggaagtatttcataatactcccgagcgaatttgtaatcatcctcatgaggttgagaccatacgtccgaagagacctgcgcaacccactcagcgaagtctttcccgaggctggcttgatactcagcggttgatgaggtccggggagatgcctgcttcgacaatgtcctccccaggcggtatcgctgtgcgtcagggtatgcgaagaggcgggcctgcaggatcggatcctcggaggcctctataccaggaacaagatgagaaggtgagaacgctagctgctcaacctcactgaagtagtctttcacgttgcgattcaaggtgagcttgccaaaaggccgggaagggattttctcaacaccctggggatatgttcccaggttccagtgcttggtgacgtcaagaatattgaagccaagatgaggcgcgtctttgggatcaataacctgaacattcgccgtccaagatggatgatcgcctcgctcgatggcctcaaagaggtccctggacgcaaagtcgggctcgctggaatccatgatggtgccagcaccatccttgaagttgggtccgcgatccgaagacaggaagaaatggacatatttgaatgagccatcgggcataacccatttgaaggcgtgtcctgagtagctgctcagagtgcgccaagtaaacatacgtccgaaatcactgtattgcagcaataccatatgaattgattcatgattctcggtcacgaattcccagaaattgttcgggttgaggcggttggtctgggggtctctccgttgcgagtgtatcatgtcggggaacttgacaggatcgcggatgaaaaagaaaggaaaattgaggaagacccagtcccattccccatcgctggtaaacaacttggtcgccatgcccttcaggtcctgaacgccctcggaggagccgcgctccagaccagtggttgaaaagcgtgttactaaggacgtctttttgccgacaccgaggagcatgtcgatattacaaatatcggagatgtcgtgggtcaccttgtcacagaattaacttctaattccaattcaggattcgaatgcgatttagatagtacctacctcgaactccccgtacgccccagctccaagggcatgaaccacccgctcagggatcttttcgcggttgaaattggacaatacttctagagtatggacatcttgagggccgatgctagaatggccggacgagggtgctttgcccatgactgggcatttcttcgcgtagttgggagccatttttttgctcaatgtattggatgaaagacttcagagtgaactgtgtcgttgagaactcggctttctccgggctaaatactactaaaatccagtatgcagaggtgtaagcccgcagagactaccttttctgagtatcgggtatttcctttctatctctctcttgttgtctgcgaaccctgcattgcatgtagagaagaatatcagctcccaacgtttcgtcacactttcattttggatgtaagggatgaactgcattccatcttgggtctgatcggaatgtagctatacatatccaggatttacacaccgtgtaatacctagtaaaatagcagtacatctctgggcatagatagcccttggaatggaaagcgcataactaaaaaggcttgatttggggagacacggggatcagatcctgagtctcctacatcttttctttttttttttcttcctgtgcatttcgatgtcactatattttagatagactgtagactttatgcatccaattgcgaaatctgagtcgcagttttgtcaccaactcatacaatcaccttttacagggcacattgattggatagatgcaacatttatgttgtaataataagcattcccgatttcacaaccaacttttgtatcgcccattattgattgacgtcaactttggcattcctttaacttcggacgtagccgtacagcacatagttagtgtcttctagcttccattttttcccttgcatatacaattaatttaccccatagtaataaattaccggaggctgaattgtacatttatcccgcataaaccagattaatctggatgcagtaaggtgggtactgagtttcaccacacgcctcttgagaaactgatatcacatgagaagttatcaatctgttgcatttcatcatattgcataataatatcgtgggctgttcacctcaaaaaaaaagatacacaattgcaacgtattcaatatctcaattaggacacatttggagctggtaaaaagaaacatcacagccctcaaccgaccattctttcacatccgtcaatcccgccgacccaaatagtacttgacgctcgtctgtatcatacttgtagctacatccgaaacgaatcttctcatgcttctcgataacgatgtcgttcaatgggcccccaagtctgacctccttgcccttcgtgatgagagaggcttcgtgtcggcctagcatatagttccactcactcagaaagtaccaatcactgggctgaaataccttctcccccattttgtttggagcgaacagggtgtttccatagtccagggacgctaaagcaaaaggaacgacgccttcagcagtgtaggcgcgcagcactttggttggcattttgcaactatccaggctcaggagaatagagctttgaactgggctagcggccaacgcgttgcttgcgatgttctgaagaaacttggctgcatttggccgcgaataattacctactgtcagtccaaacaataggagacagtgcggccggtcctgtactcccggggtatctttcagccactgcactccatcttcgaaagttccatgaagtgcaccaattttgacaaacttgaattgttcgtatgggagggactgcagcgtagattgaagctccgaaaagctcagatcgagtgcatagaacgtgatgttcttctttgatgcctctagtgcttccagtaacggtaaaaccttgtccaggcttctgtacagcagtgttagctatctttcaatagaaatagaaccactcaggtgatcattttactaacgcgctcccaagatcaaccactacactgttattggcaatcgaatcaaccatctcagccgctcgggcgcgtagaatgcgcagctcttcatgtcgtggatagaagtcagcggcggtagagtgttcaatccagtgccgaattccttccccgctgtagaagagaagagctggaagagttttgggcgtagtagacagtccagccgtgacttgatcgggaatggattcctcgaatgtgctctgacgtatgtcaataatgcgtgagttgatgatagtcatattttcggttcctgtattttgctagagaacatgaattgcatcaagaattgattctacaccagactatctgacggctcagccacatttaatcctcatctctggcggtgagcacacgagcatctttgtagtattctcaccaaatacatcgatacgtcacatgtattaaatgagcaagtgagctcagcgtatctatcgccaagttttccaatgatcgtcgtcctgtcctgcacataccctccgagtcccattcctcactacccactcctaacttgctgatcaaaagcccctctcggtcccaccgtcgcttcagctgtaacaggcgggcgtagctctgtccccaatagacctgttggaaatccttttcgttcgggtcccccacgttacgataggataaccgaaacctcgggtcaatggcataaagcaagggcatgtgaatattcgtaaggttttgtaatgcacctgcttttccttcaatagtcggctcaaccggtcgcacgaagttgatcagctgagtagcattcctccaagccggatgcatggacgtctccatgaggtctccatttctcatgacttgccctccgaggttactggtgaacaatagatcgcccggccgcgtggggagttgggccagaccgtcggccacgtatgcaggccccttggaagcattgaataagtcgttagaaatggcgacagtggacccaagaacaccgtagtcgttatcggtgtgaatgtcgggaacctgtcgatagttcatgctgagtttcggcaatgatgttgattcgtatgtcacatgagtttcaatgcgcctcatatcctcaacaaatggctgcattcgctggtcgacatccgccgtattggtttggttcagaaagaacattttaagttttgcctcaatagagtgttcagatatcacagtgatgatcagctgcccaccaacattttcacggttcaatgactgcaggacagtgaagaatgcagcaaggcttcgagaatattcgccgtgagattgggatgtctgcacgccgagctcagccgcaatagcagggacgtcgggaaacactcgcatagtagctcgcgtaacaattccaaaagtcccacctccacccccccgcaatgcccaaaataggtccggattccgaatagcgttggccagaacgatgtctccctgtctcaaggttagaaacccacaatattgtatggcatcaggctctggcaggcttacgctagcggtcacaacttcaaattccagaacgttgtccactgccaatccatggtgtagactaagaaaatctgaaattcctcctccctgcaggaatcctcctacaactccgactgtaggacaatcgccaccgacaacaatgtatccattttgtgcggaccttgcgtataggtcccccatcataacaccagctccaacactcacagctggaccgaaagacttttcaaatccgtggagctgaacattatcgtggaatttaatatcttgcagccggtgggtatggatctgcaatgcattgggcgagctggatcgacccgctagatcatggcccgtgttccggatgataaggcgaagatcgtggcgtttagcaaacattacggcttcttgaacatgttttgtggagttcaccattgccgagtaaagaggaatgcgcccttggtggcattgggtatgaccattcatctgagatcccaatgggcatgcatcaccaggggattggccagactcccatacccaatcctgcaatgcacctggttgatagtctcagctgaggaatcttttttggaggtacccaacgtgagtgccaggcttaccaggttgcgatgccctccatccactgtcccttgacatacgcatcacatcctcgcataaggtgtgatcgaggctatggttgtaacagactgatgcaataggttgtaacctaacaagagtgaactccatcgatctgtttagtaattcccattgttcatccgacggccaacagggttcccacggctggcaacgacatgaagactgtaagaagtgtgtaaataccagccaactgagagctatacctagcccagcagtccccagaaaatgaaacatcattgccgattggtggtggatttctatcaacaaaaagaatgtgcatagatgcggttcagaattctgtaaatccaacccattttatgcttgcattcaactaaaaggcggtggccagccctctagattatttgatgagtttccaatattacggccaagtccgagagcaaagcacaggaacatagttcgggcctacccgcagtgtagatgtaacgtatcgagagctccactatatacgtaaagggtgagaatgaacagtatctcgccatatctacgagagtgttgatataatcaatcatgatcagctgtatgtgtgctttcctgcaagtctttcatcccttgattctacggtgtatcttgcatatttatcctggtttccgtgatcttcatgatcatcgaccattctattcaatctatagccgtattcactgtggaaagatatagtgtcagctttggaaatatatagtgtcagttgtagaacgtatagactgcttcattctacaactattctattgtgttaagcagctgtcactatgggctccattgaaccacctaatgcttctagctgtcttgtataccagaccatcactgagtttgcagacttccccgatcacgatcagaagctatggtggcacagtacggcacctatgttcgcagaaatgctcaaggttgctggatatgatattcattctcggtacaaagctctcgggttataccagaagtttatcattcctttccttggtgtctaccctaccaaaaccaacgatcgatggctcagcatcctaactcgatacggcacgccttttgaactgagcttaaactgcacccactcagtggtgcgatacacctttgagcccattaacgctgccaccggctccctgaaagatcccttcaacactcatgccatatgggacgcactcgatacactgatccctttgcagaagggcattgatctagagttcttcgcgcatctgaagagggatctcactgtcaacgaccaagacacggcctacctcttagagaaaaagaaggttgggggccaaatccgaacgcaaaacaaactggccttggacctgaagggtggcgagttcgtgttgaaggcgtatatatatcccgcactcaaatctctggcaaccggcaagccagtccaagagctcatgtttgactctgttcatcgcctttcccaccagtacccgactctcgccgctcctctccgcaaattagaagagtatgttcactctcgcggaacttccagtaccgcctctccccggctcatttcttgcgatctatgtgacccacgtcaatctcggatcaaaatatacctcttggagctgaatgtctccctggaatcgatggaggacctgtggacactaggcggccgacgaaacgatacccaaacactcgctggattggagatgattcgggagctatgggacctgatcaaccttccaaccggtattctctcgtacccggagccctatctcaagcttggcgaggtccccaatgagcagcttcctctgatggccaactatacccttcaccacgacgacccaatgcccgaaccgcaggtctactttacgactttcggtatgaacgatggccgggtcacggatggactagccaccttcttcaggcgtcacggctacacccatatgctgcagacatacagggatagcctgcgtgcttactagtgagttgaaacaattctattcactcaacccgtctaacaaaatctagtcctcatgtggatcatgacactgtcaactacctccacgcctacatctctttctcttaccggaaggggagcccgtatttaagtgtctatcttcaatccttcgagactggtgactggccaatctgtgagtcaactttctactcaaattcccatgatcttgttttttaacgcggttttccctcttctctcatctagctagcttcggtgcgcctatccttgagcctgtctctaagaagatgtgtcgtggccatcctgtctctttcgaggtacctttgacaaagcagcaggtggtggccagtgagtaaaagaaaccatatttggcgactttcaggcatagggatgtgaccagaaagaaacactaacgcgaattccacgatatcgcggtatggagttgatctagatgtttttcgaggagatgtgcaatccaattgatgaccggtgtaaattgcaggctagatggtaggagtaggttaaatgatttgctggaatatatgtactcttgattttctgaatattgatgtcagctttgaaatggatgcttcaacgcctagaaatgggtgtatgcggagatttgtatggtgggaatagcttcattttttggggaacagactttgcttattaagccctctgtcacatgcccaggtggggtctaaaataaggcagaatttagacacattcaggcatcaaccctgcaaatcaggcatatgacctttggcagctctgccctttcgcacgcggcctagaatgggtacgtacacgtacatatacaacctagatagtagagtcgttcgattctgaactttcgaaaatgcccaactcgccaatctgcgcgtttgtactactcgaactgattgttttccccagtctttacttgcccctctcacttgagaattcatatagttctaacaaattccttcttcttgctctcctccatatctctcttcactgttagtactccatcatgcttgaaggtaagtgtgtgagcggtgtttttgttgtatgcgcgttcttggcagttcaacttccccggtcaaattttcccgctctgcttcttatctcccaatcaacccgattcagattgtcggagccctgtgagaagtccacgaccggttgttggattaattgtatccttgatcgtctgtgtaatcctgtctttctcagtcggctttcccttcaccaattcctgtcaacccgcctcctacctttttcccctccatgggtgtcgcaagactcaccagacgaagcggtctcattgcgcgcgcagtgtgggattccaagtactcaccgagacccctgctcaccacgcagtctctcgtggcgcgcagcaagatcgctctgtccccgcatcacaccaagcccttctcaacctccccatccctatcctgcgcgagacaccaaagcaccagcggagaaccaccgtcgatcgcggaaccacctgccaagcccaagaaccagacccagactgacattcctggtgcggatcccgcagaccgatatgcagcaggcctgcgcctgaacaaggaatgggctgcccagacagcccgcaaccagcccgagctcttccctaccctggcctcgggccaaacgccgcagattctgtggatcgggtgctccgactcccgctgccccgaaaccaccttcctaggcctgcagcccggcgacgtcttcgtgcaccgcaacattgccaacatcctccacccgggcgacctcagctccaacgccgttatcgaatacgccgtgcaatacttgcgtgtcaaccatgtcgtggtgtgcgggcacacatgctgcggtggtgtctcggctgccatgggcaataagaacttgggtattttggatccgtggctgtttccccttcgtcagctgcgcgagcgcaacctggaacttttgcagtcaatgcctgctgaagaggcgtcgtcgaagctggccgagctgaacgttcgcgagggcttgaacattgtcaagcagaagagtgttgtgttgaacgcgatccgcgaccggggactgcagctgcatggcttggtttacgatgttggatccggtgtgctcagtgagctggacacgcaggactcggaggaggttatcagggcccgtttgacggcttttcaaaccgagtgagttagcggggttttttcgggcttgggactctttcggccgaaggccacgggatgtacggagtagcagaagcgagatttgcggagtaggacatttctggatagcgacagtgtgcatttgatgaattgatgataattgtaaagtaagatttctctttttttttggcctagagggatctctcgttctctcagaatgtaaacatgatggcatgatgtgtgggtagccgatgcgatggaaagaccaatcagaggagacggtgaggttatacgaagtatgtctgccaaattgggaggagcaggtatcttttgtatagcaactccatacaaaaggtacatatacacctagacacgattaggtgcatgccacatctacctatatatgtccatagccttgcttgtcttatgtttcttcttttcagttctgtttgtattctgcaatatgccagtgatctaaggcctagatggtgtaacctcgaccgtttgactcttcacagtccttcaccgacaatagttatagacaaaaaatgacatcagtaccatgttatagaaagaaggttatcaaatatacaggcagaagcaagcaaatggtttaaatcgtaccaaagacgtgtctcatatacatgcccaggcggacaaacatataagggtaatccttcccacgtccaaccttccaccatccacctttcttctctgagtactcttctcactgaaacttctgatccccttccagtttctctgacttgacatccattatgaagatcgaaatctatgatggagttggtggtaagtctatattccttctgacatttgacctatcattcacatgccaacgatcaaagctgtcgatgatagcatcacagaacccgaggtccaagaaatccagtatgagcctgagggtaccctctgtgatgtccgcaccctctaccagaaaagttccgatggttggggccaaccggtatggaccaaagaaatgcccatcgacttgcccgcacccgtcttggatgcagagtcagcacaatacgcactcctcacgaagaaggtgaagtgcttcgatggacgcaggagcttgtcgattcattccgtcgttgtgcaaagcgagcgtctcaatgagttcttgaaagaggcaatgaagggttatcctagtgtcgccctgaccttggatcgccccgaattctgctcgcctttccgggctttcgttcatcgatgggaagaaatcaccaaactgcgggacgaagtgcaggatccaacaaccaaggcccatgtcgacatattctaccgcatcatggacgaggagctcagggatgtcatcgacagcaagaatgagctggttgccaaaggggtcatcacttttgagttggtttggacaatcatcaaaccggacgatgtgatcctttcttcggccaaggaagggctccgtgcttattcgtccacacgcggatcgtcggacggtgagggatcgccaattgattatttccaagccgaatacgtcgaattcgacggaaccaagttcggatacaacaccatggatttcatgatcccccgatttgaaggcgctatgccaatcacctcgttgactatcttcccgctcaaattacaccccgcgaaggaggcggtccaggagatgttgactgcacgaggcaagaagtgggaagccctcaaggggtaccatttcagatcctatgattcttcaaccagcaccaactccaagggtcatgtcaagaatcgcgtcatcattgacgcccaggcatacaacaagtttgcgcaccacaagacaatcaactttgatagggagattggtgaagaactggatgatgctcagcgcctcattgcaaccccaatgctcaacggatatgccctgaatgacaaaaaatggcgttcgttccacgtggatcatgtgcaagacattgattgggatgagcaggcttttgagtcactggtcctaccgcgggagcagcaggggttcaaggacgtcatcttggccgtcgcaaaggcccagtcccagaaaaaggatacatttgacgacgtcattcggggcaaaggccaggggttcattgtccagctcagcggtcctccaggtgtcggaaagaccctgactgcggaaagcgttgctgaggtcatgagggttcctatttatgttatgagtgctggcgaccttggagtcgaagccaaacgcttcgagtcaaagttgaaagacatcttggagctggttcccaagtggggtgctattctgttgcttgatgaagctgatgtcttcatggaagcccgcgattccgccaatctcgatcgcaatgaacttgtctcgctcttcttgagaactcttgaatactacgaggtaagctctgaatttgggcgaagcgcacaaatgacatgatactgatcttttatctttctctccagggtattctcttcttgaccaccaaccgtacgcagaacatcgaccctgccttcgattctcgcgtccacctttccatcgcctacaaggatctcgatgcggaatccaggcgccaggtttggggacagttcctcagccgctcgatgaacattgaagccatcacggatgagcaacttgaccaggtggccaagttgcaattgaacggtcgccagatcaaaaatatcatcaagaccgctggtcttctggcttgttccaaggagcgtgagatccgatttgacgatttgcagacggtgcttgctctgagaaatttgcagaagtgatgcctggtgagacaaggggcatattccgtacttcatgatgtgagtgagatggtagctggttggaaacatccatagacttgatattgaaatccaaaaaagcatgattttatgcgcaattttgtgtctgtaaaaggcggaccggtgaattgcctcttggttagttttgctgtttaggtttagcttctgtaacataactaggatggatactgttatttttcattcttgatacagaccgatcaggtgatgtgactaggattcaggccgaaacgtttgtcttgtttgttgtgatttgattactagtacatttgttttgtccaccagattgtgatttccggactacaacatagtattgtgaatttagagagtttttattgggattattatgccacgtacacacttgcattaccaccgtttatctgtcaatctcatctctttaccacccaccgccttgtctggttgtaaactgtgggctggtactcgtaaagcatacacattttcagacacatgcggcagtgtcagatggattccctgagggtgaggggctgttggcacataacagcttggagaggagagggctggtgagtaccacacttcccatcgtcccccgggggactgaaattgcctcaggaagatggtatcctggtaagtgctaatgagcccatattcgcaattcaacttctgcatatctcgcaggggttacgcgagagtgcgccgaagctctgtcctcatggcagtggccgctgcaagatcatgctcatcgacccacaattctccagcttgattcggttgtgccatttgcgtcttgggttccttcgggcggatgatccaggattctgatccgtaggaatagttttatagatcccactggaagacggattccctatcgggttggtgagtcgtcttggcgaaacaattggtcctgaaggaacgataggttcattgaccgcaatggtagtctcctgatttagccctacaacgtcggggatgttggcatgtacttcctgaatacttataatcctcaaagtagatgtcgattgggtggtttttcaaggctgtcccaagtacatggcctatggcctttgaaaactgccccggagaccgggctcatcagtgatgtacgcccgcgtccgtcagcatttccagtcagagctatcacgcatccagtccaccctgtgagctgacctcaccaatctcaaaattgcgtatgtcacatcggataatggtgtaggatccaagttatcgggatcacggaatccagaaatatgcccagaaagcattagctcaccattatcgatgtttgtaggctgtcgtagccacctacatagatttagtggtggcctcatcataaatgagtttcctcaaacagcaaattgacgatgcccatacatccttttgtagctctcttcttgatattagtactggtatacaaagggagtatatatgatcttacttataagtagcgcggaaaacggaacgtacctcctcccggtattcgagatcacgtttccagtaaggaacggagttaataggttcaccggccacccgcgtccacacgacataattgatataacctccagggacgtagtctcttacaccttgcacccggtcaccatgaccaagtaactttgggattgcagtgcagttcttgtgatatagactttatcaagctcaacgccatcgaacaacttgactccgaaggggctcaggtagcgaaaaacatccaccagttaggccatcagaaacaggaatacatagcttggtacaccgacgacgcgacgacccagtacgaggaatacaaagactggataaatgggtacaataaagcccataccgctgagaaggaacgtgagatcttagccagggaacttgctgcccaggttcagtctgtcaaaatggatttctctggggaggttttgaaatctctgctcctccactacgtcccaaacctcgacaccctgacgcaggaggaagcacagcaggattgaccttgcaatcggatttccttttacaccaattttaatatccatttttacaagagccctcggggcgagggcttcttcggaaggggcgcctgttgccacttggtcatgtgaccgggccttccttagtgtagctcgcagactagcttaatcaatcatctcttaccatccacactagttgtaccaacttggtagcatgtcttgagatccacatcagcgggatcccctgagctagaaattttcttttctagtaaaatagccatcggagaccctctgcaaagaggccagtcccccagattccccgacaaagccagccatcactggcaaaatcatcagtttcatcagagcggatggacaaacagctccacagagccatcctcctcgctgtacagctcgataattacatccagctcgaccaaccttgtgctgacgaatttgactctgacacgaagtcaaggatcagcttcctactgagtccccactttaaccatcccacactacccaaagcagaagatccatacccacctgactggtcgattcaccgaccaagcctccataaagcgactgtcgaatttattaggctttcccctttcatctctccaccgatacaggacttatgagagccttgacatccgcgtgggtatgctgagtgagagcttgctgagctcgagcttgagggggagtgataaatagtaccgtcaatcggaatttgatagtagaaccgtataaagctctgttgggtggggtcgaggaggttatggcatgagaaattaagtgccgcaaacggatggccgaggtcatcatcatgttcttcctgtgtcatggtttggaattcttcagacaatttatcatcgaggacaaatgttgcactgggtgagggggaagaatgttcaagcgttactttagtaccgtgtagataatcgaaatctcctagtcgagacattatgatgaatagagagagaaaagtgcgagataagagaaatgaaagagaagtgaagtgcagagagaagagaagtgcagagagaagagaagtgagagagaagacgagcatagcatatccatggatggaatatagattggtaattaatgccttctatccgtattgaccgtattgtaaaatgcaggttcaacttctgtatttctgtatcgactcctaatttgacttcgtagttcgttaactaaccggcctttgcatttttttacaaaaattacagaccctcctaacgtacgacatgtttgcagatgaccactcgctacttacccaacatggaggattgataaattctctggtacaccggcgtcttatactagtatagagcttctccaagagagcaaggtgctatgatgcagaatagtggaaaggcagccgtttctaaaagcggtaacttcggcataattattatcttatgcacacatgcaagttgccgagacctccgcttgccggctaagcaggcaacacccaaacatcctcagccaagacattgacatctcccgtcaataatgcaatcttggcagaacttggaaaccaacgaaataatcaatctcatctccagttttccaatactccggcaggccccgggggtggcccttctccccctgaaccacatctagaacatatagggctacggggctcttcgtattcgcataagcagacggcccactccggtccatacatgcgttatgttgccctgcaatatgacaacaacatggcctcttaaggctgaacgaatgacatttccccggagcgccgatcatcgtcgaaaagcagggtacacagcgcctaaacaccacaccatgacaccccagggctgagcaaagacccccttcaggtccaccttgtgttggctagtgcacccgcacgatccgaccatttgacaattatagccctggcacaattccgatagcatgttgtggagccgagtcaagatctttgtcaccctatttttccctgttttccctttttttttcccctgccccttatatggtataagtataaacggattgaaaaacagtccgtgttgaaagatttcctcatgttggccgcttaagcgctgggccattatgattgtcactcgttttcatcatccgcagcgcttgattttgtcgattttggtgctgtccggtctctgctccaagttgctgcacatataccagcatcgatcgcttcctctataccttttggcgatctatttcccgacattctttattcaggaggtcctgctattcgttacagtatggattctcttatatacaacctccggtcggtgggcagtagccgccgttatcggttcagcgattatcgcgttggttcaccttttccgaaatgcgacgcgcaacgatattgacttctaccctcagatgcactgatttactagcaaccgcgtcgcagtttagtttttattctcagaccggcagcgaaattcaatgggatgcagccaggtccgtgggcgccagtcgacagggacagaagttgatattgagcggactggtgccaatggctgccactacaacagttatcgtcgtggcttcgtggcttatggcccaaggaatctggaatctcatgacccgctggctatgctccctcgcccatctcggagacgccaagacttccgccgtcttacccggcccctcagatttgagaaatatactagtgtcaaatcgacctcggctttggacgcttgtggggactggagtcacgatcggactttggctgattggcccagcaatcccatacaatcacatgactggagctctgcccttcaccatgctcggcgaacactctcgggctcgtcagatgaccatcgaaacatttccgctaccagaattgctagcggagcgataccgggaaccggaaaatggacactacaaggggtgggcaccgacattggacgactcgagtaacactgcctatggaaaaaataagccagcctgggcgcaaggccctcttcctgctgcattcgagagatggattgtgaatcccgattcaaatacggccgactcgaccattcaaagcctgtccaggagaggcggaaacaaatcccactctgaaggccagaataagacagctggaccgcgacactacttctataaccccgttcaagatcccctgaggataaacaatattgacctggaaccacttggtcctctgcaggaggctctgaaggaccatgccatcccaatcaaccatatcgtctttgtgtttttggaaagcggcagaaaggatctgttccccctcaagaacgattctcgactgtacaaccaaatccgggaatcatatgaaatatacggagaggaggatgaagccgatctgcacgacaagctgtcccagttaacacccgtcgcagagatgcttacaggggagccatccggcttcggcgcttcggtgagctcaccaaatcccggactaggtggtctcagcttcgacgggatagtgtcggggagcagtctctctgcgaaatcgcgtcttgtcaactactgcggtcttggaccgctccccgtggactttatgcatgaaaatgatatcatcccataccagccgtgtctgatgcacatcatggatttattcaaccagcgcaagaattcttctagctctaggaattctaccgatagtcacctggagcgggaatgggaaaccatctatgcccaatctgtcactggggagttccaggagcagactcggcttatggatctgctcggtttcaacaagacattgtactcggaggacattgatgtggaggatgcgaagtatttccatgaggatatggaaaagatcaattatttcgggtatgttatcacgcagtatacccagcaactttcctcgtgtgtaaatactgactttgcatagttatgccgaaaccgaggcccgcccctacatcaaagacttaatcgacgaaacgcttcgtcagaacaagagactcttcctttcgcatttcaccagcaccactcaccacccttggggtacacccgagggctggaaccgagagcactatttcggtgatctccacaaatcacaacacgaactcatggatgatttcctcaacgcaaaccacttcgttgacacatggctcggcgacttaatgggcctgctcggagaagccggcatcgccaacgagaccttgacagtctttgtgggagaccagtacgtgcaattacccaccagtgaccaaagaacctgacatctaaccaacgaaacagcggccaagcatttggagaagactgccccatcacaggaacctaccacaacccacacatcagcaatttccgcgtgcccctagtattccaccaccccctactaccccgcatgcaccttaatgtcaacggcagcgccgtatccatcctcccgacgatcctcgatctcctagtgaacaccaactccctcaacgcagacgacaccgaaatcgccctagatctgatgaacgagtatgagggccagtccctcatccgcccgtatcgcacctcgcacaacggccgcgaagcctggaacatgggcgttatcaatgcgggtggctcgatgctgagcgttgcctccgctgctgtgccctggcgtctcaacctaccactgaacaatgacttcgagtaccgcttcacaaacttgaatacggacccgtacgagcttgagcctatcaccggctggacaatggactctcttgctgcggaggtccattccaagtatggacaggaggcatttgaatgggttcaaaaggccgagaaagttggcatttggtgggttgcggagcggaaaaagctctggaattatagtgatcctgatgagtgaggggtcgtttatgacggtggatacctcatgttttttttttcttctctttttcgtccttggagcgaacttgcatagcatacattctggggtacatgttttgtttttgaggctgtgggatagtttggttccctaatggctttgtataatattcgggttggtagacctgctgtatataaaaaatatatgaatttcgccttttttctaagattccgattagacacttcaatcattaatcagtatctgcgtatcaatcaggcctattcatattattttcactgtggtttccttacaagacttctcccctgactagtagatttctttttcacatcattggggtgtgttggcgacccaaaatatggaatttgtaatgctatccggaatattatttagatttctccttcttttacaagtgagcatatcagatcctataagaagggtctttctgatccaaaagcctcatataagcagacatctccttcagtccaaacttagaccccgaaaaccctttctctcgggtggcattccaagttctctcaattttgatctcctctggctgaatcaggttccccttgtccccaagcgcacacgccgacgcatgagattgaatctcagaagcagccagcaattcatacatcaaataccaagcagcactaattatctctgcagctgtgatgacaccatgattccgaagaatcatggtatcagtcgagccaagatcttcagcgagactcttctgctccccgcggttcgtcacgataccttggtagtcatggtagctaacagggccagcctggtgcgtcgtctgcgccaactccagcagtccatccttagtgcacgccagtcctgtcgcagggggataatggcagtgcatgacgcttgccacgtccggccgagcgcggtgaatggcactgtggattacccatccggcgtcgttgataccgaacgtgtctcctgtcacaccgtggtccttgatcttgccgtccgcgccgactttgatcagacttgatgccgtgacttctccgtatcggagaccgaacgggttgatgaggaacgagtcactgccatcttcttccttgacctttgcggtgaggtggttgtagatgttttcgttccagttcttgagttcaaagaggcggtaggcggctgcaagttcgattcgagactttacttcttcgtcggggagccatttgaggattgattgtccgagcattttgtgaactgcgggggaactgtatttggcagagggcacgtgtgttgcgggatcaacggctgttgcataacttcgtggtagggtgattgttgtagtgcctatctttgggatacgggctcggagcgagcctgtgggaatgcggattgcatgtcgaagaaccgatggggcggttgctaaggaggccattttcgatgtccacggtaaatgtggtttatgacggtgtgatgaacgtaggcaactctggcggagatagtgaaaggctgtttgttatgctggaaatgcctactaggcaaggcctttttatacttgccagacagcttcacataacgtaccttgatagctctaccacagatacgtcaccgtgagacaatgaagatatgccaacatctcacaagaaaaaaaaaacgtttagccaaggttgcaattcacacatggacatgctaagcattagcaaggccaatcgggtcgtcgggaaagtcggcataagcttgctccaactaactttatatcatgattacaccacgacccaggcgtggaatcttgcttttgctgaaactgagcttggttgtaacttgtcaggaactcaatgccatactgcatagtcaacggccacaaccttagctaggagagagtgcgttgcatcgattctatatttccgaatttgtctatcaaacattagcaatcggcgtgttatgtactcttcgtcgaataccaatgttggatatatggtcgagtatcggatatgatacccacaattatgtgtccatagtaagtggataccacatataattgaaattgccaccgtagaaagaaagagaattacacatcatcaagatgacccattcaatacataacctgttcagtttcaccatgaaggctactgatcctgaacatcacgtcaaggtgcaagttttgcttgggtgccattgcaattgagagatcacctgatctagcaacaacataagctatttggagtcactaccataaagcgagaccacctggtctattaattgctctatggctggtacccacatcataccctcaacaagcatgtgccaagctgaggcaagccctccatatagccttggatgattgagttaactacggcgcactggcggttggagccgtgatggcagtatccaaggcggtcagcccctggaaatgcaacccattatgaagtgccaagtatgtacacaatcaaaatcaagactcggagaattatgcttatttagctaaatttggagggcgctagcaaaatcggggtctaaagctaacaactttatagtccattttcaatgttgtcgccctgtagacggcgattattaccgacagccgagaagtgctgacgaggcctcatggatttgcggtccacttgaagatctttatagagcctgacggggaaagagcaccgcattttcacgtttcacccccttcgctgcgtcagatgatccaatcataaccgcctttgtttggccctcctgcccctaccattcgcccacgggactgggcgtctcctgcgatccgcacatatcttgccttgtctagaccccagcgatggtgccccttccttttctcttcttcatgacttccctataccacgctcgttaagaatgctgtttttgtgcttatcgtggctgtcatggctgtcatggctgtgccaaaccgcgctggcgcaatattccagcgacgatctcatgtcattcgttacagttcgtgtctaacatcccacaacttgaaattgtatgatcgctaacaccgtgttctccagctccccgatattcgggcagtgaaattcaatgtccagtaccagaaccgcgagcgcgtcagccccggttactggttcgtcgctccttatctacacatcggccccgacccaccgtcgaccttgtacgagcaatatcaaatcggaccgcatatctacgatggtgaaggagtgcgtttacaccagtcccccgcgatacagatcccgacagctgaccatatgtcggtataatagcgccttatctggactggctcgcaacagttcgagaaccgaaacgtgttcgatttcaaagtcgtcaacagcctaggcccggacccacacctctcgatggtcttgcagaactcgtgggatccggcaatagacaccgggtacggggtgatcttgaccaacgattatcaagttcaacgaaagcttcctttgcgaaaggaccttggctcttttgacatccacgagttcaatattctggacgacggtaagactgcgctggtcacggtctacctttctcatgaggttaccctggaggacttcggtcgcccgacagagactacctggcttgagaccggcgggtatgctgagattgatctgaacaccgccgaggttatccagtcgtgggattcttataagcgcattcctttgcccgaaactgtgcattacaaccagttttccccagtggagggacatcctggctgggattatgtgcatatcaactcagtcgacaagaatgaaatcggggactacctgatctcgtcacggtttgcgaacaccatctacctcatctcctgcatggatggaaatatcatgtggcgattgggtgggaaatacagtgatttcgagcaagatttcacgttttcgaagcagcacgacgcgaaattcatcgagtcgaatgggacacaccatatcatctcgtttttgaacaatgcctcggacgaggaattcaatgaggaaaatatatcatcatccctgttcgtcgagttggataccggcgcgaggcccatgaccgccagagccatccggcgctacaaccgccccgatggccagctctcgagactccgcggcaatactcagctgcttccgaacgacaatgtgttcacttgctggagcaaagagggctatatttctgagtatgccgccgatggcgaactcttgatgaccgctaacttcacctcctcacgctattcatcataccgcggatacaaatttgaattcaccggtcgtcccacggccccaccagacatggtggcgtcggtctacggcacggatgcgaccaacatggtgaccacgttctgggtcagctggaatggcgcgacggatgtcgcatggtggaggttctacgcgcaagcctccgaattccacgaccctgtccttatcggcaatacctcccgatccgatttcgaaaccatgtacattgcccgcggatatctggactgggtgtctgtcgaggcagtagatgtcaacggcaccgtcctaggcaggtcggaaatgcaccgaagcaagtcccccgactggaaatctgtcggatacaaagggaaatcaagcccacctattccggccgacccatcgatcgtataccaggcaagcgatagcgcagcagaagacaaggcggttggcgactctggccagatgtcatcggatgcaatcgagacccaaacagagaagaccacccaagtcctcaatcacacatacaatgctatccgcagcattggcggtgttttctctttcgttctgcttctttgtctgtttttcgctgtcatggcatcctatttggtcatccgtggctggcgactccgggtctaccagcgtgttcgtacggaagatgggggttcagaggagcgggcgcatctggcaccgttgcatcaggattgagtctctttggctttgattggaagcatacgctgtttgcattatttgcgggagttttgtacgtcattttctgggtctttgatgggctcttgtccaatgtgtatatagtacttgttattggtttcgccgactacctggccataggggagggggggggggtttggcttttgcgatatcccgcgatttgttcatattaaacctcaactgtgattcagttctgatatgtggaatgaccttgtttgaagtacgatcggcgacagagccaaatggaataattgtttgacttaagggcttcttcctaaacctaggatctcgtgtaaacaaacaaagaaggcgcaatgcatgtgacattgacatggacagggaagatgcgagggagctgtcgcccttaaggaaggcaccgtttgtcgagggtatcaaaggacccttccccccatttctcttctcttcttctccttctcctctccccatctctctggccaccatctcaccgtagcccacgagacagcgcaggcagggggacccgtagcacatgctgcttcacctaccacagggaccatgaaattaccatatgtatgaggtccatgtaggtctgcatcagataacaaaccgggctttctcggggacgttcctgaagtcgtggctctcattgccacttgacgagtcccacggaatacatgaggggtgtaaatcttcgtagccgagggcgggtcgcgtaggtttgacctccatgtaagcatcgaagctcagctacctgactggttaatggatcctcgctcccctcatgtcagcattggaacctccaccagggctgatccacagatgcttctttgatattcgagtggatcccactgtttacaatgagatctaggtcttgaagacatcaaccatgagaccctgcacagtttgagcgttgggaaggattgcatctggccacgatacggtgtactcggactttatgcatttctctcgtgatgcaggcagctcttgtatcggtcgccgaaactcttatcatggtgatacaaacccgaacaagagaagagtaagaaatacccctcatgaggggtatcacttgaggggcatcttgtgaggtaaatctcaactgactattttatgtctcttttgatcgtctattccagagtgtccgtcaggaaatcgagacaccggtcgagaccctgtgttatctcaccttggaagatatcacacaacatacctttggatatcaattgagactgtttacactattggagaggccataggaaagtggtcctaccccttgttccggcccacaaatttacttgataagaactgaaaatgcccgcatcgtacggcgcttattcccgatactgacaaatctcgggaataaaagtcacagcattcccgaagttattcccgaagtgtctttcccgttatctataatgaagtactccccgtacgtactctggttcgactctttctttttcgtcagtcatttcctagagctcaatcttggaacccatctgtttattatccaaccaaattcgcaaggaattgatacccaccatgccctcaacaagcttatgccaagatgaggcctgccctccgtacagccttatggatgattacagtgaaggagcccacccacaaatcctggaagctcttttgcgaacaaactccacacagcaagttacatttggaaacgatgaatacagtatctgtgcacgacaattgatccggaacaagatcggttgcaccgaggacgaggcgggtgtcttcttcgttcccagcggaacctccgcaaacctcatttcaatcgccagctgcctaaggccttatgaagctgttattactctggagtctggtcacatcgcctgcaaagaggcaggtgcgatcgaggcgaccggccacaaacttatcctcgtgcctgcagtcgacggcaagatgacgcccaccaatctccaaaaggcgctccagcaaaatcaattctaccctcacatggccaagccccggctactttatatctccaatgcctcagagagtggcactgtctacacgaaacgcgagcttggcagcctctccgcgatttgcaagcaatcaaatatcctgctcttcatggacggagcacgaatcggctcagcaatttgctcaaagaagaacgatctcactctacgggagatcttcgacatgaccgatatcttctggattggtggcaccaaagctggcgccctgatgggagaagcagtcgtcctcaagaaggagctagctgatggcttcgatttccacctcaaacagcatggcgctttgctagccaagggccgtattttcggagttcaattcatggagctcttccgatcagacttattcttcacactagccacgcatgccaatgagatggcccagaagatctcaaacagcttcaagaagttgggttataagttggctgcggagacagaaacaaaccaggtgtttgttgtcattcctcaggaattagttgaaagactgcatgagaaattccgattctatgtttgggagcagcttgatgatgggaactccgtgattcggcttgtgacctcctgggccacggatgagctggaaattgataagttcaatgcgtgggtgcaacagtggacagtggaaacctccagttgaagtaatccgccgtccattaaatgctgccgacaggattcgttacatatttcgttatcactatagaggtaccccatattaacataatacccgactcaataaaaccatcaatttcaacctattcacctacagtatctgcgataaacttgtatcatataggttcctaagatcccgctctatcctcccgactagcaaggacatgaatgcgctaggccttctcgactcgaatgatctacgttctcacaacaagctaggaggtgtcactgatttctaagaagtcgatagtcccaccgtgagcttccattcattacaagctatgctgttcggtgccggggcgcatatgtttcatccaggctacgcatggctggtttccagcgcagacatacagcgcccatcacggctgcagaagacagggccactgccacgtagaaagtatgggtcaatgccttattgtatgctttcagcaccgtgccatattgatccgagggtatatggtcacttatttctgttgcacccatgctcaagacggcctgagcatctattccatcgacctcttccgccagatacctcaccaactcattggtgaacacattctgagcaactgaaaccatgatgctacccataaggttctggcagaacatgatgatcgctgtgccaatggcaatatccgcgacgggtagagcctgggcagttgtcagagcagtttggattcctaatcccgaccccgcaccgaagaggatctggtatcctatccatttacctgcccctgtatgtacctccagtgtacttaggagacctgatcctgtggcgatcaagataacagaaaggcaggcgaagggagcgtgacagcccgccagagaggtgagcgcaccgcccgaggtggaaaatatcacgaagctaataattgtgggcaatgtcatgatacccgagcgtaccggggatgcacctttgattgcttggaaccagatggggagctattgttcgcatcgttagcggcgcgggtcaatgaagaattggcgatacttacgtagtacatcagtgtgaaaaacgcagcgacgatacacgatccgtacattgatgagccccagatattcctattttggaccacccgcatggggactgtgacatgggactgcactttggtgaacacttggatagaagcgaaggcgagaaggagaactggtccaagaactaggagagtaatgatacgtccgctcgaccaggcgtattttgtcccaccccactgtagagctagaagcaagcatataacaccagggagaagtaatgatacccctggaaggtccatctggcgaatcttttctttcatggacgactgagagaatagttgcggttggtcaatatcggcattgggggcgttctttataggtcgaatacaaaggaatatcaccaaggccacgaaaagccccaacggaaggttgatatagaagcaccaccgccatgtcaattgcgtattagttgtgaaggcgccgcctacgagaggacctgcgatggagccaacgccaaatgccgcgctgacaatccccaccatggaagcgcgatgtctaagagggactcggtgggcaaccagcacgaaagatcctgcgctaacacctccactaccagcaccggcaattgcgcgaccgacaatgaatgcggttgaggatggagcgacgccgcaaagcaatgatcccacttcaaagataaacaaggcagccagataaaccgacttggcggaccagaatgagtacagcttgccccagatgagttggattgcgcaaaaggtcaacatgtaagcgcttgcataccaacccacatcgtctagagcatgaaaccggttggtgatttcaggtattgccgtcgacacaattgtactatccaagccgagtagaaacatggacagtgcgagagagaacaccaccagtgatattgcgatccagctggaagtgcaaattgcggcactggattggtctgcttcaggaacatattcttccctatcgactgtaattgatgtcttgctctgcttttcggggtctgctggatgaccatcattggaggtgttgatgaccatgatctgctatgtaggttggttattgctgtctttccttttctttccgacagaacaatccccacgctggtagttacaataattatgaactgaatcgagcctaaaaggggttaggaactttgcatgcacagtctttgttagctaagctattacccaggggcctgtttccagggttccgaaggccaggtcaactccaggggcaaggggcaaagggaaaggtaaatggcgacgtattgcagtcgatcatcgtgattggtcgagtcaatctcatctaatgggaataaagccatatgcaagggacggcatcttctatcctctcctcagatctgtttaggctgaacgggtcgacattcctccttgcagcgtcacgggaacactggaatgtgtgatttggacctactaagcgcgctctattttagcggctgcaagtagacaaggcaaataaaaactatcatggcaattgaaccgcactgaacagtcttctagaagatctggcactgttttttgtctgttttcagtcaactattttggaatacacaagatatgcctcaacgtccatttcatactcggaggctccggttaccgtttatacatgtaccctgcccagacaaaggtcgaagcgtttggtgatacggcacacactaggatccgtttttccagatggagacggtagcacagccaagttcctccaagatgaatccgtttcgactggatagaacccatctaccggatctagtctggtctcgccccgaatatcgtgttgactaggcccgaagatgtcaagacagcgtaccgtgattcttggcagtctcgcagggcgcaaaatacaaactccagctagcttctcggggcgctgatgggtttgggctttcttagtcaagaggatggaagaaggcccatgaggattccagttgggggaaaaacagggagcagtaccatccgcaattttctcgaagaatccacgagtgcgtcccggtaccggctgtagcgatatggccttggccctcgtcaatgcatggcgcagcatgttgtagatgttattctcaaagtgctgctatctaccgctttcacccctgccgcgccataccgccttataccgcttttgtggtaaatagtagcaagacagtagatgcctgcaatttgtatgtaaattcctaatagaattaagtcacttttgtcataaactgcttcatcaactgtctcattaaaattctgcaaatttataccccatagatccaagtcagctgatcgcgctaaccatattcggatactaagatatccgcgtaactcttgcttcttcggacgtccaactgttcgattaatcgatacaaatgattgaattggtacaattggactcctatattgatccgatggcttaattctttcttaatatgtcacatggtacttgacagccagttcttttcaccacagcccactccgctcttccccgtatgtacactcgatgaggctgtcaatatcgtgtgatgcttgtcggtaagcttctatcgatcttatgcgtatcatatcatctaatctttcatgtagtcaggcaaaagtcaaatgtcttcatgaagggcaaccgccctgtcaacgttgcttgaagaacaaaaaccaagaatgcgatttgacagatccccgtgcctcaaaacagaggacacggggaaatatcgtctcatccaggaccccaagaaaacgaaaagcattgtctgccctatctccaatgatagaagatgcagaaagaagcacccctaggaatgtcaccgtggctcaagacctatccaaagatcccatagcagcgctatcgccagcaaccatcatcagcgcagtggaaacctacagaaaaaagttcccaattaccaattttcttcattacccgtctttgatctctgacatatcatccaacgttcactcggtggactccgtctttgtcgcctcggtcctttccttatgcgtgcggtttatgaacagcgatgaactcgaggaagaagaaacctatgccgactatgcacgcaagaacctggcccagcgcgtgcttgaagccccctcgctttatcttgcccagtccctcgtgatgatctcattttatgagtggggcactgggcgaccttatcaagcttggatgtatagcggtacgtatcgaatcgtcaactgatcgtagagcattagctgacgagcagcaggcatggcgacatatatgatacaatcccttctgaagatggcagatgatagcatggaacacaatcctcaagagtttcatgcatcccaaacacaatacgaacaactggtccgaacctactggtgctgctttgcccaagactgcgagctgagctccggggcccgtcagcactttgcgctatcattctctcagatctcggtccctctcccaatcagtgatcgggacttcacatttaatcatactccagccaacaggctgatgcctgctgatatgaataaagactgtctgctagcgaagaatcttacgattgagcatggcctgacaattgtcactcgagggttcgacatattcgtacgaatcctaagatttgctaatgaacatcgacgagcactggcttctttgtcttcagatgactcggctacatctccgctcctcttgacttggcaagtcctcaagaaggaattggatgaatggaggtttcttcaggatgtaacggttcagttcccagctaccagtgttcaatcgcacgtagcactcgggtacggggagctgtttgcatacatcaatctggttcattgcatgaggtattcgtttctgtttgcgcattacaggccgggatactaactatatctcctccagcatcctttttctccatcgggaccgcttcttatccaacctaaagccccattccgacgttttccatgacgcaaatgatgatacccaaggcgagcccgatacaatcaaacagctattcgaagccgctcagcagatcggaggtatcctcaatgcactagacgcctccggcgcacctataatgtcaccatattccggcttcagcgtctttgtcgctgctcatatcaacatgtacggaacaattgccccacagcgatatccgggtggtctcaaacgggccgaagaagaaaagagtcgaaatcttgactatctcgagcgactaagtaaactctggccggttggtcgcagttgggtgagtattgaaaagaaatctctaaccgaatatcacagctaacaataatcagtggcgaacagtacaagaggcaaaccgattctacgaaatagtcaagagtaaccaatcccactccgagtctggaatgcacagccctaggagattcgccctcgcaggtaccctggatgaatatggcgacatccgatctcgtccaagtagagacgcgtatgcgaccagggcgcgaacctctgaatcccgtgatacgcacagttctcatacttgtggaggcacttcatcgtcgcctgctcttggtgaaaccaactttcttcccagggagaatgctgccattggtagtcaccatgattttgaaaccgatatgtttcaatggccatttattgatggatcgtggtcccttgggtttgatgcgggattggatgggttgtggtataactcagggttatttgacccaaatccatctcttaggtgatgttgttccttttcgttggggtgtatatgtcgccgtgtgatttccctacgaactcacaagaagaaatccttttcgatatgatgttgtcgattgaaattttaccatcgccgtagatatatatcgccacaatttgtccgctttttgcatttcgaactttctagtaatacaactatctcattcaataaaaatttaaacaaatcttaatctaacattagaaaatgagctccatgtatacaaagctattaccatttgaatattgtgcataggcgggatgtgcgtggatgtatactttggtggacatcgcttataatggcaagatggccatgtcctcacatcagccagccaagtggccgagcagtaactcggccatcgcattcttccttggtctagtggtgatgatttccgcttgtcattaaaaccgataagcgcgggagaccggggttcgattccccgagggagagatttctttttttttttttcggtttagacttgtttcattaagcttacattgaacaatggatgggagcttctattacgcatagaactgacgcatttaggctgacttatgatggccttgcactttatttttgtgttatttttagccactgctttttttacaatgtttccccgttgtagctagaaaatgacagagaatgatggtggtggaacaatatatgaggctgaagttgtcgctggagtaatccaccttatggatccagggctatatctatacggagacggagacatagctcactccagctacgattctaggacagaaagcatctgcagcaaaaagagtccatagataactatctaaacattcaggttaaatgagaccttccttgcgattccctcgagacgcctagcaatgtcattacatttgcattgacacgggtctctgttaagcgccaatgtcatatgaaccaagtcgtgctccatggtaagaaacacattctcgaacttgtaattgccatcatcttcacggcaccaaaaggcagtattgcgacgaataatctcgctatccggggcccgagcaatcatgccgaatgcaatatctatgatccgatctgtgcgaatagacagatccactactgcctgagagacatccccgatgcgttcctttcctcgactatctggatcgcaccgtagaatatgggcttgggcatctaggttagctatgaagatacggcattcgtgcaagagcttgtcttgccaggatgaggatattggtgccatggttttggtgagtatgcgtgatagactcgagtagacgggggagttggagtatttatattaatatgattggggaggatgacctcggacaatgagagaggccattgttcgatttctgattgggaatacaaaggtatacaccctaacaaagacccaatcttgtctttcttccaaggttagcatgggacaaagacgatcatattacctggatatatgcgtacaacaacatagacatgtcgaaaagggtaaagagaaacagaaagaaaattcattagggtaattaatgagtgggtatataatattgagagatcggccgacaactcctagctcctcccgttaagatgtttccacggtctgtgatacaccacggtcttcctgatgccctcctggtcgttgatagactcagactcaccagcctccggggaccagcaaatgaaatcagatggctctggtcaccaaagtttgccaccttatcccagtcagtagcagtacgggaagccggggccgatttcctatcactcaacggatgggtagaggcgccattgtagtatttctgggacgagtggttcttcttgtagtgggacagtaggacattgaggacagtagacaggcgcagatcaatccaacgcctccctcggcattgctagtagaggttaggaaaagaaagaaagcaagaaaaactgaccaaaaggggatggggtacgacatacccggataagatgacacgaacgaacataaggccctcatcgcttgaaccttgcaacaccatgatcaatcggtaaagactgaacccggtggccagcccaccagcgccaagtaggcctaccacgcgcagctttcgattgcgcgacatttgcaaagaccatgtcaatggcaatgggagaataagaatgatgaggtcactgaccacactaatcacggagtcggcgatcagggcagcggtctggtctagacagcttccttcaccacgtcaccgagccagtatctgggaatgggagcacagatgcgaatcttgacgatcagagcaacggtgtagtagcagcataagcaggcgaggaagatatagataaaccagactttgctgcggaagggggcgaagatgcgggtgagaattgctaggagggcgattttgacgaagagcgccatcggacagtagagaatagtcgcaatatagcagaactttttgaatgcgattagctcgtgagggctaatatcactaagttcgtatcctcctccatgttggccaactagtagagtaagtatgtaactgggaaaacgtgggaagtatagcgcctaccgacgatggatattgcacaatatcccataaacagaagctgcgtacagtcagtcctggccaataaggcactagattatttgctcaacttacccaagcaatggtacaggcaactgagggagtgatcagtaggattgcagtatatgtatagagggagaaactcacggtcttcaactcctagaggatgcttgaatcgaaaccgagtataaaatcgcaagattacgaagatcgtcacgattggaatgcagagacattgtgtaacaagattgacagtatgcaagacatccgttgggttctcgacagtcatgatgggcttgaagttgaagtccccctccccttacaataaaagtaccggggaattcacaagataaagaacttcacatcgtggaaatgaggattgacagaaagacgatccttagcggggacttcaaagctatcgaaccactgctatgtatacttcgtagtggcgcgggatccatgacggtgataattgctcaaggggctgccttagacccaccacttggctcagttgatttctgaatggttcatgaaggatttccatcaataacgctaaatagcgctagactccgtttatactccaccagcatgtaccgacggcatgggtgccagccacccgggcaaataccatagtgttcaaaaagtctgttcccactgccccacttgctatccccctaacaaccatcgtggttttttttcttcttcctacacaccccccaatgacattgccggtgccacccagtcaaagctagcactcgattttaggtactcccgccgaacgatttacaatactttgaaacggttcaaagaacacaatactgttaaatctctcccttgaaccggtcgcccaaggatctttagtgatcgaactcgccatttactttttatactcgcccgccggcaccccttttggtcctataaaacgctgagttgtgctatacctggtcatccatcccgctctactattattaacgttttaaggctaaccggtcttctaaaatataggacaaaaaggaagattctaatcggaaaggaattagctcgacgacgatatcgttttattcaaaaatagcgctctgagtggtctagaaataacgtttaaaactaggtcttctcggatgagtattctgtacaacgaataacaaactgcagaccacaatggtgttggcgctttcggtcggagggctatagaaaagatcttataaatgctaaggtatacattaaagatatttcacaaatggtttagggtacaatctggttaagaagtcgattagagttgattattataaggcgggagaatattattaacccggaatcgaagaagacaggatatactactatttcctatatagatactctcgaagaaggtctacttccattctatcgaccctactctatcttttagtaagataacactcggatccatactactaaaatcacacaggaatggtttaaaactcacgggatatatatagaggagtagctgccgcactcactagatttaaacccgattgaacctatatagcggtggctaaaggttaaactttttgagttatttcctaagctaatatatataggaaggtctgaggaggattagatagtattcaaaaggtatataaagatagcataggatgctattccgcagtcgaagattgattcattgattttaagtatagggcgcagatatatggcagtacagaaagcaaaggggtattatacaaaatattaaatttaaattttacccgagattggcatagggttcaaccctatttaattcgaagtaaattgagtaaagtatggtagtgctatgcatagatatgtagagatatatatttcaatgttcatgggtgaaaatgcgggtgggaacagacttattaaaccccactgtagtatcgattctagtgcctcgtatttccccgatgcagaatttgcacagcggttcgccaccaacaccgttgttttaccagtcaaataaatgggccttagttgaaccctatattggctagccgaggcactttggcagctgtgacagctacgatgtcttgggttaaagatcgacattgggccgaaaaaggagtcgcatgtgtgtttttctccttttctttctataattccgtctgtcctctataattcattccatagtaaagcgacatagaacagaaaagaacaaacatgaccgtccactacctgagcggcaaagactcggatcttttcaaaccactgacgatctccaatggaaacatcaccctcgaacatcgtgtcgtccatgcgcctctgacccgcaaccgcggagagccattgaatcccaccaacaccccggaccaccccaatcgtatttggatacccggcgatgcaattgtggagtattattcccagcgcgctaccaaaggtggtctgataatctcggaagggatccccccatcgctcgaggtaagtaagcatcggacccgatttgatggcataaaccggattattatgtgattccggcattgcacgcttaatgacattatccaaactttaattccaattatttttaactccgtttccacagagcaatgggatgcccggtgtacccggccttttcaactccgaacaagccgcgggctggaagcgagtcgtggatgccgttcatgcgaaggggggcattatcttttgccagctgtggcacgccggccgggccacgatccctcagatgactgggtcgcccgcagtctgcccgtcggcctctgtgtgggattcgccgacggaatgttattcgcatccgcccgtcggctccacccagcccgtgccctacgccaatcacccgcccatcgcaatgactgtggaacacatcaaacagactatcgaagattattgccttgccgctaagactgctatggatattggcttcgatggcgtcgagatccacggcggaaatggttatcttccggagcagttcttgagctcgaacatcaacaagcgcggggatgcttacggcggtaccccggagaagcgctgtcagtttgtgtttgagttgatggagcaggtggccaagaccattggcgagcagaatctggctattagactgtcgccgtttggaatgttcaatcaagcacgcggagaacagcgtgttgagacttggactcacctatgcgagggtctgaagaagaccctcccgtcgctgtcgtatgtcagctttattgagccggtatgttttgtttgtctctatctaatgacatactgctaacccgcccagcgttttgaacaaatcttcggggccgaagagaaggataagttcctcaaaagctggggcctgctgggcgtgaccctggatcgtttccgccagatctttggctccactccgttcttctccgccggtggatgggatgatcaaaactcctggggagtagtggaatcgggtaaatacgatgcgttgttgtatggtcgatactttaccagcaacccagatctggtgtacagactgaaggaaaagctccccatggctccatatgaccgaactcggttctatggaccatttgaggacaataccttccattacacggattaccctactgtggatcaacattaagtgtttcatagagtaaatatagatgttacctaggcagatagatatgtgaaacttggattttaagcataagaataaccgtggaaattctcagccttcaccccgaaaccgagtctagaccaagcccgaccgtaagcgacctatggtttaaatgaatgtggaattccgggagtcagccctaatgcaagacacggcaatatcggcaacattgtgcctcgtgggaatcatttgtaatacggagtacatcgttatgctcggacattagtgatcgactgccgtgatgaagatcgtccccaaacgggctgcaggctgcagctgcactctaccgaggagactgcaaaaacctgacgggagagaaaatcctaaagttgtctcgacattctctaaatttgggttcggcagagtatcagtcgctgttatattgctcatctcgaattacgagctcaaggcccacttataatgacttgatgcttttggccgggaccatactggcaaagatcacccacttcacccgtgcgccttaactagagggaaacggtttgtattacatactcaccaacggcaaggcacagccaaaaaaggaaaaaaagtgggaagcaagcgataatctggagtttgtatcgcacagcttcccttttagtgctagccgatgccaatagccgacgccaaggcgatggcactatgttgtactatatcttcctacattaagcgaacctgcgggccggatagatgtgaaaatgctgcgggaaaaccccatgagccctgaaaatgccgtatggaattttgggcaggaattcgaactgtaagcgctatgaaaaggataccagtgaatgcgtaaatgcggtacgtagtcaggacttacttatagcggtacccgaagcgccccgaagcgccccgaagcctatccgttgataaagaggctaataatctctccacagtatgcaccagcttgccactatcaaaggttatacatagaaaaggtcggttccaaaaattcaggcttttcccgccttttcccgcctttttccgctgtctagaaaactaagaagacatcgagaattgtttttaagaccaaaaagactagcatataactagccaattgttcttgtatgtgataatgctatcagtaatattttattgggagaaagcaattgggagactggctccacgcactgcttcttgataggagtctgacgtcaattggcgcgcgtaaccgactatcatgtagataacagctacattgaggtgatgtatacacttttgcacacgactacatgattatttgacactagaggcacaatacttcgccaccccaatcagcaatcaacgtacagtcactatatgcaatgaccgtcgcaaacgaggagataggcatttcctgcgaggaactatgatgattgtgagcattgggcgttcctcattcctataaagtttagtagaactctcttttgaaatctctttgacgtcctacaggtctctcttgctcattttgcagagatgcttctcccagtttccagagcaggagggatctttgtctttgtccgcatcaagctatttagaaagcttcatggcagtagttagatcatcattgatgtggatcgaggagaagagcaaacaataaaatgaactgtattatgctaactgagtgtgtgtatatgtgtagacaaaaagaaggagagaaaggaagatatggtagtcctgataaacagggtcaggtgacgtgatcccaataatcaatctataagattgattgattattgttgtcactcttctctgcagacacatatcagattgcgatcagtacaacttacaaaccaagcccgtcttacgataatatgaagtgcactttcttctaatcttccaagctgcaggtctcctatcctaggataaactcatggcgtaagaaaacccctttcacattgtagcatcgactctctttgtttgtactgctagattaaaaggaagaacagacatgctcatattctcactgcagaataagaccaggtcaacaggaccagtatgaaagaaagaagcacctccgtttgatccatctgactttacccatagtaaaccccctcctcaactgggtcaggaatgtcccctggccatctgctattgacgctctccatcgccagctcgatctcatcctcgtcagagaacacaccgtatatgtcgaaaagttgaagctgatcatgaacccagatgcgactatcctcagcaaaattatcaatctcaaatttgtgccggttgttcacaacaatcatgtcgtagatatctcccactgtgtatccggggtgcacgctcagagtcaagatcaattcccgctcgggtggaaccaaggtcgctcgtctttcaaacgaaatgatggctttggagccatcgtcaagaatcgtgctgtcttgtgagaagcttggaccacaattcagtctgatcgccgtcatgttcacttccgatgtcgacagaaaaaaggtccagcgatttgcggaattgggatcgagaggtggcaggcatatggctcgaatgcaatcgagaggctcgttcaggatctcatctcgctccgaaagaggtttgaactcgattgggtcccattccataggaaagtctagttctgttagatctttttgttaacatatatggtgatgggttgacatactctggaagaactcattgatcagcatgttgggtactggccacaagggtagagagagaagggaaaacaattctgaaggcttcagccatggcagagatggctagagagatggtaagacatttcgcgttaaaacaatcatgagaatggtccggaccaccttattcatgctaatttatgttctattctgtctagttgacctctcttattaggtcagccctattctatattcaacctctttctctcttgcacaatattcataacttttatcgtccatgaagacgtatacaacgaaataagcatgcaaaaatctcgatggttccaacttccagaacacatacttggtcgctacttattgtatatagcagaagtggcaggagagatggttgcgaaggggtagagcgaccaaaggtcgcctgaatacttggctatgggccttcatgtgaactaaagttccagaggagaagctagaccagtcgccactcacagaatgaaaaaggaatttataggatgttgttgcattaggaggcaaggatgtctactacggtctgtgtgatccctgtgtttgctagctgactgtcctagatggttggtgttgttgtgtcgctctcgtcttgtctgctaggccagactgcccatcgtgtatatccctcttcaatagtttgataatctattatatgattacgaacgccttctttcacggtaagcctgatgcttgatactatataatttccaggttatttacatagttcgaagataaagggcaaagaaatgtagtattgtccaaatcttattgcaatatattcctaggatgtctgctggcagatcaaggctaacgaattgcctaacaatctcggtgattcgatcaacgggagtccattacagatttggcaatggatcgtaaacaagacggtaacaattcaagatgaaactccttatcgggtgccatcataaggttcgccttaggctagctaggggtgcaaatttcttttggtcggtaaaagagccgaatacatagaagttacagagtataggtacatgtatatgctcctaaggaatggctgttatagaatatcgtttctcatagtcatattaacgcagtctaaacactgctgtcggtgataattatacaggacttagcaaatctactcgtcatcactttcctccccttcaatcccggaaacctcgtcttctgaacaaggttggaaaaccccaggggccaaaattgatggccgcgccttgatatttcgagcacaaactcccagcagaaggtcatcatcatccgaccgactcctcgtagccccgtccagcacgaatttgtattcgtggcccatctcttctacgagggccaacagcatgttgcgcgggagatatctccccgcagttccccagaatagctttccctcctctgcctggaggattgcagccgcctggctggacttcccttggctactatgctgccagcacatgcgtagcatctggacgcagtagtggaagtacaaatatcgagcagcagggcgaaagctcgaacggaacttgagctggcggccgtccagctctccgaatgtgatagggtgatgtcgggagaccttctcatccctcctctcccagtccgggtcaataagcttgactcggtactcccgaggctcacagttgagccaacccttcacggatgctaggacatgcttctgagcttcaggaatatccggtactatagcaaatttgccagcatcgaagtatctttcaagccttctagacagaagaaggccatttcgaggcgaggaaagctcctccggtcgcgtcttaccgaagatagcatccatcgtatcctgcccattcatatatgggaacaggtgggatgcttgtatgttttcttcttcgtcaaaatcacccagaatggggcaccaaatccatggctgcgtagagtggcgggcgtcataagccttgatcatgcctgtccgaaagttggcttgttggctggtgtcgcaattcccattgcctgtgcctttgatggcaatacccatggtagaggtagtgaagagtttcataaaggatgcccttaagctccgacgaggtagcacattctccaactggctaaccctattctcgcagattttccgagtctgcgcctgggcttgaatccgttctaatatcattttggcctcgtctgtcttcttccattcttcttctaagcccccgaaactaccaagtgaaatcttacgatccacttctgacctttccaaattgattctttcaatctttacagcttgactccagagctttaagtcaaatgacccatgtgccctccatggtttccgggctatactcaaattggttgtgagttcgcgctttcttttctttagaatacgtatagtttcaggctcggtctggagggagtccattgattcattcaagaaatccataatgatggctagaatcaagtttgtgtctgcggatttgaagttgcggtttggagattcaggcttggagttcggagattcaggtttggaatttggagattcgggtttgcagcttggagattcaggctgagagcttggagtctcatgtttggagcgcgggaaggtactaagcctagtatagctgtgattgtgtcatgatgatatatggtcccgccgtttcactttatggcagattatattaacgcgctaaattagcgcttctaaataactataagaatgaacccaattctttaaccttcatggccatgcccaataaaggatgccctcaagctgcgaggtgccacattctccaactgaacggcagggtttagatgccattgcgccaactcgaaaaataattagggattgttggctctgactacctacctgccttcaaacagttgatgaagcttgacgatgaagcagttgatgaagcagttgaagcagttgatgaagcagttgatgaagtttgacgatatagttgacgatgaagttcatgagggaagcaattgataatgattcactcatttgctaaaaaggacttaattttgctaggatagtagtatggcagtaggtacctacaatttgtatgtaaaccactaataaaattatgagtaccgtctcatactagtttgacaccaaagcggtgtatagaattgtaaggcagtatcgaaagcggtaactaactagcaggtactatgactgaattttcaggcacaaggctaggccggtttgagaataggtaagaccaaggcggtaaagaaattatatgggttggcgcgatggcatcactcggcagattttcttactgggcatgaatccgttccaatatcatttaatgagtattccacaacttgtttctatccatttttattgaaataattcattctctacatgacctcaattatctacgtttgatgtttccctcttagtgcctcggccacctttctcaataacccattgtttacttttttatacgatattgggtgattagcctaggactctcacatatacttgattttcaatagggtactcggctgaaatactgtgatattgctgcccttcatacatccaagactaattggatattttatttgcctaatattgccaccgtagatacatcgatcaccacctaggaccatgatccatgatctggagttgacttgacctacttcctagttcagcaatccgtgagacctaatctgaacatcctccaaggcttctaatttctaaaatcggtactctccaagagtcttaacttagaatcaccaagatcatgtttcctttgaacgtaatgttgaggctctgctacttgtagataaaaggaagcttttctttgtcttccttgtgtcttctcatgtctcactggagtcgggaaaattccgagaatatcgagtagactatgtaaactcggacaagtaaacaaagaaaaatttacatcgtctctgttgttctgctctccaggatgcacgtgttgttctgcagacgagacgaggcacgttaccatatgatctgtcttcgcagtccttctcagccccggagatcttcttctcctttttcttttccccttctttcaaattgcctgcaatggatctcgttccaagtgcctttgtggcacgtccgttgaagattgtggttatcggtgctgggtaagggcatagtgaactcgcgataattacttctaacaaattgttttagtatttcgggaatccaattcgcacatgatacgagtatatccttgtcaggtgtcgatctcgaaatctatgacagaaatccttctctcggaggtacatggtatgagaatcggtatcccgggtacgattatattcctacgagctttataatcagatgaatgagttcactaattgccggtgatagatgcacatgcgacgtgccttcccacacataccagttcaattgggcgccaaatccatcatggtcgtcgctttatcctccagctcccgagattcaccaatacctcgaggatgtggtcgacaggcacaatctccgccattttatgaccttcaacaccaaatgtgtcttggcgcggtggaacgaagactcctcgaaatggaaagttgttctctgcaacgtggattccggtgaagaaacgaccatatttgctgatgtctttgtctatgctgtcgggcggttgaacaactacaagttccccaagattgcgggccaggaaatctttcaaggagttcaagtacacactgcaaactggccagctgatatgactgtcaaagacaagcgggtgatcgtgattgggaatggtgcaagcgctgttcaatgcgtggcagctttgcagccaggtgagtcgcaaagtccccccgaagacacacacaccacgctaactgggctcaagttgtttcgcaaataatcaacattgcgcgaggcccaacgtggattcttccacatgcattagcagaagatggcatcgtccagcgcgaatgtgagtatgaaagcaaaggacgagcgacagaagggctgatccatatctagactcaaccgaacagaaacaagcgctccaggcttgccctatgcgctactatggctttcgcatcgcattagagcagagacttgccggaactttcatgggactctggagaggaaccagatctcaagctaactttacatcactggcaaattcattcatggagtccaagatcacaagccccgatcttttaaacgcactcctgccagaattcgaagccggctgccgtcgcttcacgcccggtggtcactacctggatgcgttacaaaagccaaatgccgtgtacgtgcgtgactcaatcaataagctgaccgagaatagccttatcactgaatcgggaggagagtacaagtgcgacatattggtatacgccaccggattcgagccctatcagccacggttcccagtcactggccgtgatggacgatcgctgagtgaagactggaatcgtgagggaccgtgcgagagttacatggctgcgatggttgcggagtttcctaacttcttcggtaagaatctgaatgctttttgttgatgactgtgcttaaatatctcggacagtcttcaaccccccaatttgccctgtgaatggatccgccatccccggtatcgagagagcaagcgactacatgattcggatcatatcccgactccagacagacagactgcgatccgtgtctgtgacccagggagctcagcgtgcattcaaccaatgggttcagtcgagaatgcctcacatggtctggtcaggaccgtgcaaatcatggtgtaagtaaatatctctatcccttgttcctagatttgtagatttactcatcttgtgatacagacaagaacgataatggaaaggtggttgttccctggcccggcactgtcctccactactatgcggcaaccgaaattatccgctgggaagacttcgatctagtgtacgagaaccccgatgagaaatatgcgagtttcggcaatggtgtgactgttgatggatttgtgcccgatcatttcccttgggttcatccacccactgagtttcaaaagccggaaaggaatgcggagccaacttctcaggttcttgcaccgcaaagcagtatgttgtatcgagttacaagccagattttacagttgctgggggcatggccgcatcctggtgaaccaccagtcaagagttgaggaatgttactatgctagctagcttttgtgaaaaatccaatatgttttcgggttaaacgatctaagtgtatgcttagtattaaaacctgaattcgtgctacacttctaaataattataaagttacgctaggtctagtcgtataaaatgcatgaattgactctattttatagatcttatatccaatgatctagaccaatcagcatgaaggtggatatatcagtaattccatcggctataacgcctttacgcttgttatccccggcagatgcgcttagattattaatgagctcttgaccgatttatttaaatagtctaaaggagtttcgttctgtttcttctttgttccactaatcataattcattgtgaaacaattggtgagttcccttgtcctgatgatatgacgtcatattcaatgtgatattcaatgcaaaccaacaagaataaataaacaattccaactaatgataatctctgtattagaactcatatacatacgcccgcaatatcacaatggctgataataagatggaatatgtccggtacagacccctgtcccacacattccagtcgaatgagatgctgatatcaaacaaacagcctcggaaactcaggtctcaagatctccaagatcatccttgggacaatgggctatggcagcaagcaatggcaagactgggtccttaatgaggaagactctctgcccctgatcgaacatgcctacaagcagggcatcaacacctgggacacggtaattgaaaacatcagaatatcttcgagaaaaccaccgaataagccactaatattcaccgtgtaggcggacatctactctcacggcaaatccgaggaaatcgtcggcaaagccctgaagaagtacaacatccctcgcaaccgcgtggtaattctaaccaagtgcttcttcggcgttgacgacgagggcaagttcccacccatcgccgcatccggcaaaaacgacggtcccttcgtcaaccgcaccggcttatcgcgcaagcatatcttcgacgccgtcgacgccagcgtggaacgtctaggcacgtacatcgatgtgctgcagatccaccgattggaccgtgatactccgcgcgaggagatcatgaaggcgctgaacgacgttgtcgagagcgggaaggttcggtacatcggtgctagttcggtaagtccatcctaccttccttccttctgttcttattctcccctttcgttccttccgttttatgatccaattgatctccactaacccataacaataacagatggcagcatgggaattccaatccctgcaaaatatcgctgagcgcaacggctggcacaaattcatcagcatgcagaacttccacaacctcctcttccgcgaggaagagcgcgagatgatcccctactgccgagactccggcgtcggcattatcccgtggtcaccgattgcccgtggtgcgctggcgcggccttggggctcgcgctcgacggtgcgcgagaacaccgacggcgcgctgaagatggttgtccgcagtcgcgagtcggaggcggataaggctatcattgatcgggttgaggaacttgctaagaaaaagggcgtgagcatggctcagattgctattgcttggtctttgacgcacccgggtgagaatccgattcttggtctgcatagtgttgagcggattgatgaggcggttgctgctattaaggtccggctgtctccggaggagattaagtatttggaggagccgtatgttcctaaggctgtttctgctcttgagcggtagggatgtgaagggaatatatacggagttttagaaggtctgtaaatactgtgaataccatacaatttagaggcatcttgatattctacaataacagcactgagcttttgatgttgaatggtacctaggcatatagcagttctacgaggcattagacatctcttttatctacgatatacggagtatgcaaagagaaatatcctccgtatatgtcagatctaggcatcaagatattctgtagtacttcggttgtttcggaagtattctccctttctgagatcacatttcggcacccctacggggtaagcatccactcgaacacccactcgaaacatccactggctcagccacacatttccgacaaatcaccctttacgaagtgggaagtatacacctcataagccaccaccttggcaaaggctagctggtattcatcatatttggacaagcgcatgcagatcgcattattattaccttggcgaacgctaattcgatcgagatagtagataacggcgtggcttagcgcccaacacaggatgatccctccccgatcttctctagcgctttatgacctgggagatgcagatggacgttactccgaggacgccggtctcatgtattgtagcaagaggataggctgtaacgaattgacagaaaacagaactaatacatccttaacttgggttcctaatgagattagcaagatattttgagtctatacttaaaatagaaaggcttgtggaattcacagtgagtgatgggtattatattcatatgtagcgtgattggatagatgagtagcaatgtgcacaagtgagataagcatacatattttgacctcatgatatgaagatatgctaagaagtaggtagaaaaagagaagatagagggttacgcaaaaagcaaaggatgctagatgctagttggaatgtgtgtgagagagggagagagggagggagagagggaactagaagaaaaacaaaccggcaaggattcgtaccagacgaaccacactgctacgtatgaacgcccaactgatgccaattgagatgagactcgaaagaggggctatgatgatgtctacatgtagactagccacaaatatgatgcaggggtatagatggtgatgggaaatggaaaggtcaatgagtatcgtgttttcggtggaaaatgccaaagaatgtactcaggcggcggctgagtttgcttttggtcgagtcgacagctccagggagcggagcatccgacttcttcttgcgggtgctattatggtgcatgaggtgggaatttgaggcaggcggatctcgatctggccgcggttttgatcgaacggtttctctttccggctgggctttttcgggggacttcgctctaggataaacagctcgagaagaatcttccacctcagcggacggtgggcgaggagaagggggacgggagacaacgatatcgcggccattctcgccggaggtagtgaacatgctgtgtcggttcagacgagtactcagcccagaagcggatcgtcgtttcgctcgatccatgaatgcagcaccggtggagttggagcgcctggacaaactacctccatccataatttgggaacggcggacactggaaactgacaagcagcgcttgccatcttcagcgacattcgggaaagagtcggtttcattcttggaggtcgtcggggatgcatacttggcggatgtcggagacgtactcgactttgcgggcgaagacaccgggtcactgtagcggaaattgtctgaccacccctcacggaaggcaacccagatgccggtgacgacaatcaaagttcgtagtccatcgtcaagaatgactgagctgccatcgaggggagtctcgtccgaagcatcactcacgaccgacattcctgagcttggagtcgtggggccggtgccagaccgaacagccgtggaatattcattattgacttctaactgatttcgagtcatggacgcgagcacgggatgtcggcgggtggtaggatcgatgacactgaaggtgaagcgcttgccgtcctcgcgcgattgtgtcgctgtgggcatagtcatccggcgattcctcccaccacgcaaagcccaccgcacgacttgcacgccgctatctgtctgagcgacaaactcgtaagacccgcttgggagaggcgcggcctcccagatcggcccgaagttcaagcatatctccgcctttccattcatgcgagcatctccttgatatttttgacagacagtagcgacgacttcgcgatgatcttcgtcctcatcctccgagctgacacgtttctcaggaatgctgtccaccgcccggtcgtattgttcactcaacaccacgatgaggtcatatggacccaatccgtttcttgttcgatagatggctgggaatttgcgggccagtagcgggaggtaagacgtcgatggcagaatgtccacgactggtaggggccgaggggtttgcgacacctgttgcagttgtaggaggagtttaggacggaatctgaatcgcttgtggcgggcatgagcggcggggtgggcgaattgatacaatgttttgggtcgagacttccgacctgtgtttgaacgggcaactcgaggcctggcgaccatggctgattctctggagggttcgcccgagtccgaggctgactcaatcgaatccatcgtcatagcggatacaaggcccggacaatcagtagaaccatcaggcagcctaggagggctgtaaaaggagttcaacaatggtagagcagacagtaagaacgcaggcgagtatgtagtacacgtggaaggcttggcttctggtttcttaggttcattggcatgggcagctgcggcatccgctgtgaggccaagattcaacagcatgtctaagccctagcagagccacattggaatgagagaaccagatctctatggaatttcaccccgatccgatgtactagtcataaacgggccgtattcaaacgcgtcagctgcgggggtgggaagttcagccccggagctatgtgtggggaagggcttatgacgaggtaaaatggaacagatgtagagaccagaatgtgcaagagaaagtatatgcaagggcagttaaaagatttcaagaggaggaatgttactgcaggagcaataaaggacaaaagatgctcagtctgaatggggcggtcagccttatgaagctatgtaagaaaaaaaaaaagaaaaaaagaccgaaaggaactagtcaatagaaatgtcgtagtggaacgccatttagttgcacaaaatcccagaattgaccccccagtgtgtaatttatgtttaataaacaaattataactagtctatatcaaagtactcctccgtactagcagaaatcgcagtacggagtagtttaatgcacaaaaccggaagttcagctcctgtcagcgggctcggtcatatacggcctccgactcaccggattccgtggcgatcatcaatccctacttagtatccagtcaggttctttttggcctaagatcgggatggtctgcccctcttggcaagccccatctcattgaaaaatcggcagattggtccgaggctggttacctcatgagcccatactagggagagctccatatatttttctaggcatggtgggactatcacgttcagaagttgaattttcttggggatgactttgagggatttcatatctacggagtatgaaatccgttgatgacccgttctcaatttaaccttggaatcgggcaaattgttgtggcgcaaagtccgatgaactagcgcttatgctggtagctcagccttgggaataacggaaattcttggcagattgctatttacgatatgtacggagcacgacgggtagctacgtcgtttattgattctgtgttgatcatttgtttcacatatctaaaatgcccgcaagatgaaatttgcgagatgtccccaaatcgccacgggaatagagtccatacctcgctgtgtctagcaggttctcgcaaggacgtctcttttcatcaaaccttgacgcccggtggatcggatgactaattatgcacagttatgcagccgaatatttcagcgtccacctcttgggaaggtcgtaaggttacctcggtagatcggtcgaccacaacccggtgaatcgtgaggtaaacatcccgaaatctagaccgctaggcatcccccattggaagaactcccgaggtctcatttaagtcacccgcttagtggctggggtcactggaaacttcttatggctccagttcaacctaccgcaaggccaccgccgttgtttgccacactgctacgattggacaacccgattcgaagtttgacgctagcattttgggcatggaaggttctgttgtatatcgttgttgttgcctgtccaggatcaggttatgatacctccacctccttgatctcatatgctgccaatccaacggcccagtccgagtctctctccggaccccttagatttgccagatgggacagtatctacttcctagatattgccgaaaagggatacctgtacgagcaagaatgggcttttggctggggctacactaagcttctgtctatttttgttgcaggtacacaattccatctagcactctagcatcttctcacactaatacaggaaataggtattcgtctctctggcggagatgctggacccggtagcactgccatggtgggagtggttctctcccatgtcgcccattatttgtccgtattggcgctctatcgtctgtcggccaatatctttggccatgcgactgccacccaacacctcatttgtttcctatctgcggctctccacatcatctcgccagcgggcgcttttctttccgcgccctatggagagtcgatagtctcttttctcaacataactggcttttacctctattcatcgtctctcattgccgagcgcaatggggcaactcgtctgcgagatattcgggtcctcacatccgcggttctattcgcggttggcaccatggtccgcagtaatggggttctcagcgggttcctatttgcttatgatgcggcagttctgggctggaagatcttgactaaaggacctacactgcacaccactgttcgacttgcagtggtcattgtcggtggctgtattgtaggatccgggatagtcattcctcaaatcctagcctaccgcatgtactgcatgtccgagggcgatcttcggccatggtgtgagtggactttgcctagcatctacggctgggtccaaaatcattactggtaagcagtaattcgtgtccgaataccaccgtcctcactcttactgactgcaataggaatgtgggattcctgcgatattggaccgtctccaatatacctcttttcctgttggcggcgcccatgttggccattctatgccgatctacgttgtgggcattacaaagtccctcttcctcctcgactagcccgggctcaatgctcgctcgcttggcggttccccagggtttgctggctgtcatggcattcaccagctaccatgtccagatcatcaaccgcatatcgtcagggtatcccttatggtattggtatttggttaccagtgcggtagatctcagttcaagcacacccaagcaaagccggacccttgtagccgctgtgtatagcatggtggcctatgcgttgatccagggtgttcttttcggttctttcctacccccggcatgaaaaagaatgaccagcagggatgacccggctcaatattggcccgagtcacctgctgtatatattgatatgtgatttaagttagaaaacacggcctagactgctttgaatgaccacaaatgccgcctcccgagtgttggttgggcaaaatgcttgcgtaaggtgcctgtctgcctaaacaggggtggaagccgcagtcgcccaccaactgaactattataaattggaaaggaagaggggaaagaaacgaatctcacgcatcttttcaaacaactatcaaaaacaagtcctactatatctttagtgtatctttccacgcggctcactctgcagggcccaagcttcgttacgtataattatgtcatcacaacctcgactctctcccgtttgacctcttgaccttcaccatttaggcatctcaagaagaagagaagaatcggaggccgaaatcttgagctgctcaattaccaaaagaaatacgagcccgtcatatttcccctcgcttgccaagagaaaaagtaccccatgcgaacacagccgtgtgaaatacaatagtattcggttccaaatcccgcgcttttcggagtagcagcttcagagtttcattaaaagtacgatttccttcgaaacttcttctattattgatagggcgccggaaaaaaagatacccttgtgaaatatcgacgttgctgacgtattgcttgcttctagagctcacccgacagcaacggcaactcttccctgacctccatacccacctcgtgtcgaccattcccttccctatcccccatccgacgatggaagcctctgttcccaaggcggttctcacatccgacaatttccatcatgcacaagagctctcccgggcgacctcgcccggtggtgagcccgtcgccgtgaatagcgaaggcgaaccgatagcccgcgtgcgcccccgtacctatccatacttcaaatacctcccataccacctcgaggatgagagtgagcggaatcaaaatctgcgagagattttgaaccagctctatattgcagtggaggccggtgacttcaatcccggagccgtgcactggacacgcgagctacgcggatggctgtcgctcaagttcgatccaaccaaggcgcagcgaatcagccttgtaaaattgtattttgagcttgcgcttgctcctgggattgacccgtcggtcgctgagcggtttgcgagcatgttcatgcttctcacgaagtgagatgggttctcagtgttagttgcgaaagtaatgcggctgctaacacatcatttaggcgcaagcattatctcaaaccagtccaagatctcgtcttagattggaagcctctatacaaggagctcaaggctttcgtcctccccaccgagtccggcctcgttcactcgaccaacttgaagcgcaatgttaagaccttgaccaagctttgcgcatttgctcaattattcattgacccgtgtgagctccccgctatgcttgaggagttcttacctcattataccacatcattctcagaaggtgccttcgttgtcgccgggctcattaatttgttgctcccgacatccccggctcccgaatcgcgagtcgatctcctaccgcagagctatctgcctacacatttccatctgtggtcattggtcggtcggtcaaaaacatttgacacaacatatctggactatctttcccgattggccagagattctctgccggctgctcacattccattctccgagcatggtatcttcacaaaggaacagtccgctctccttttcactgcgatattgaggttgttggagatccccgtcgggcaatccacttccccgtacagtgccttggtggatatttcgtctggtttgggtatcatgcttgatcgagatgggcggaagcaccctgttgctcatcatattgcccggtggattgtgatgtcgctttcacccgcttgtgtagatgccgaggtttcagttctcacacagctggaaggtctaatccaagctgtcgagacgttcttccacccttcaaactcaggtcattggactaagaccctatcccaactggtttattacctgactgatttcttcgtcatgcgttggaatcgcgaacaaagtggtgagctggaagtcccgcctgagcgacgattgaatgaggctctgaagaagcggtttgtcttgtgcatccgtgacgtagtcttcatgggcatatatgctaagagcggcactgcaattaccttctccctgtcaaccttgcaaggtctggcctacttagaaccgcatctcatcctacccggtgctttgcagagaatctaccctgcgattcaaggtcttgtcgaagtacaccggaccgcatcttctcttcgggctatgacatcgctgtctcgtgtcatttcgcgtaccaagggttatcgttgtcatatgacaactttgttgggtctaacactacctggaattgacgcgaatgatcttgaaaaatcgcttcatgctctatcattcatccaatcggcctgttacaatattccaatggtcgacttgacccaagggcgagaggatatcaactgcaacatgcttgccatgcaatggatctcaggtgaaatggagaggatggaagagcaagggtccgatgtacagcttggttatgatacagagttagatgacgagaccgaggaattgatcttgcgctcttcgacatgtggtttcggagacttcacgatagctttcctaggtcgtgtcttcacactcttggagaatctgccggacgtatccagggttcgaaacggttcacccgaagagaatatcgtgaacactcttcccgccacgttcatgcctttgctcgcttctctctctccggagtattacgatatcgccttggggaagattgtggatttcgtgtccaaccatgtcatccaccaggctcgtgatgcaatggctttcatctgcaacgccctatgcaaagtcaacccagagaaggccctcaagcgtttcatccctgtcttgacttcagctatccgcactgagatcgaagataatggtgctggatcaacccgaaccacaggaacagatgttttgcctcgtgatcgaagtctggtatggaatgtcagtatgctgagcatgtgcgtggtgcatgttggcagcgccgtcattactcaccgccaagaactgtttgacattgcagtctatatgcaacagaactgccgtggcattcctacagttcatatttccaacttcattcaccaccttttgctcaacctgactgggacttatactaatgatttctcactctacgagccttcagtcaaagcgaacggcatcgagccgaagctctggagttaccaagccgatgtgaacaacctcaccatcaattggcatgtgccgacgcaccaggaaattgagtttgctgtcgacgtgttcaaaatccaaacagaaacggctttgaagtccctatctgcgctgactcatgagacatcaaccgttaagcgtgatggaagcggcaaggactggtcagacgaggtcactcgcaacctcgtactcctgcggctcgtgttatctggagtttctgtcctctttgatcccaaagccgcatcaaccacaacacaaggaccctcgaacggtacctccggggatgtcgagatgaaggatgattcgggtgtttctaatgaccatgagaatgatgaagatgctgtcctggacagctctgatgatgctataatcagacaggctttcacatatccaactgggtacgccctcaaagagggagacccattatacactaccatccatgaactccgtgaacgaactggctgggtgttgcatgatgtacaccggttcttgagcgataagcaagaggatgatgttccttgctttggcgctttgtactctgcctttagatcgtggtttgttgatgtgggcattgaaaggtccgctcatgtactcgatcgagtgactcgcctcttagccgcggacattcatccttacaagatgagtggtatgcgaaaagattaccccagacccttgcttgtgcgcagagccaacgtgtatcacctccaacgcctacgacacaacgcttctccccgtccgcgatctaagcttgatgaaattcttcttcttgatattgccgaatcttgtgtctcgctctacacagaaacgcgccgcaatgctcaaaacgcaggcgaatcggcactaaaagcggtctatggcggcagactactcgtcattcctcctctgctcacggctctgcagaggggtgtcaaggaaaatgatcatgcacgcattaaaggagcactctactcgctacttctgagcagtgtagccaagactgtcgggcggcattggaagtatgcgcctgccgtggtcagaacatttattgatgccagcgccgttgataagccttctgtccagaagatttgctccaccgcagtcttccaggtcatggattacggtcgcgcgatggagcgaatggctatcctagatcaagagattgtagaggcaattgctcctattgaagatgtcagcaagcagatcgagaaaaagcgcgcagttgtcaacagcaagcgtgttgctatcgagaagaagaaagccgacctttccgaggagctggtcaacctggcgcgggtgtcccattggaagattgccagtcgcgctgcaactatcgttatcactatgggtctccgctttgactatatcgccagcgataatttgatcgaactgatgacactcgggtctattgacgaccaccctggcttgcgaggcatgtactcccaggctctcatagcgctgttcacgatgattgatgtgcgggccatctgcacgcacgagtacaagaactatattcttggccatcagcgtttcccgtccaagatcaaggttgcaacaaaaccctttgagaaaggatacactgaacaatacctttctagctttgcaaagcctgaggcagagtactacgttgatcacgacttcccgggctggcttgtgtggggcaagactatgccggcttacaagtctaatgtagcacgggatatcgagtatgacgatgttgaatggaaggttcgcaccaagatgggcaagttgtttactcgcgagtggttctccaaattcttcatgtacttgaagcaagagccacgggacccatctgctgacaagttccgcatgtcctgtgctatgatgcttctctacgcattcgagctcatgatccgagatggacttacagtcgtctcgtttgaggaaatccaagaggagattaaggacgtctttggagacggcagtgataagcaccaacatcgtgccacggctgaaatcctcggagctttgatatcttcggtgacggatacaggcgtggagaagcggactatggtctgggaatatgcattccctattgtacgaaaggttttcaccgatggccttactccagagaactctggctattggacaacattccttcacatgatccttcaatgtcgtgatccccgccgcgcttggccgttggtcgattggttgtccagcttccgtcttgatatgtcgaccaacgcagcattcaaggaaagctctaagatcaacctcctgcatcaatgtatcattgattccggttggcactaccagctcgagaagcccattgtgaaggatttccttgcgcatttggaccacccgtacaagggcgtccgtgaggcaatgggtcaaactcttgcaacgatttatcgcacgagataccacgagtcgtaccctgatgttcagcatcttctcgaggcccagaaatcatcctcttctgttggcgcatacccctatccgcctactaaagactttaccaaggtgattcatggggttttcagtcgaatcgaggaatggcggaaggccagagctcctggccaacagacaccctcatcctacacctcgggtagcaaaactgttcttctttggttggactcgaccttgtcttctcatgagtgtacccagcttgtcccatttttccctgatgtcttcaccgcgcagctcctgcacatgatggatgtgaaggaggacccagagcttcaatccctcgcataccacgttttccgtcacctccctaacattccgtaccctgcggagaaaaactccgaattcgttcaatctctcatccgcatcggacagtcatccccgtcatggcaccagcggctgcgtattatgatcaacatccaaatcatctacttccgccgcctgttcctgctcgaccccgcagaccgcgacaagctcttcgagtgtatcgcctccatgctcgaagacccccagcacgaagtccgtgctggcgcctcggccacattatccggcatggttcgatgctcgcccgtcttcctgcgggaaaagatggtcagtcgcttccatgaacgcttcacgaagcttctggcagacaaccccctccctaagaaaccgaagaacttccgctctggaatcgcctcctccgccgtctcatccggcgctggaacccccacccccgagcacaaccgcttgattatcattcgccatggtgctgtgctgggtcttggcgctttgatccaggccttcccttacaacagtcctccgcctcactggatgcccgaggcactgactacgctaagtatccgcgcggccaacgatcccggcatcgttggttcgagcgtgaagtcgattatcagcgagtttaagaagactagacaggatacttggcatattgatgcaaaggttcgtacttatgatataggttcaatcctcgaagcaaacggctaacgattttcaatataggctttcacctcggatcagctagaggacttgtcaggtgttctatggaagagctactttgcgtaaatggaacttgggtatttaattttcgtgggtttctttggattggcggcgggtttcctaatgacaatgtgattaatggccgttcgtacatattccaagctctctgatagggtggtgtatctttagtacggaaatgaaagacttgtgctatgcttatttgctctttgtatagatactctgggtgacctattgtgtataaaggctataattcaccgtgatacgcgtcttttctaataagcccaagaattgagtgtgacaagtgaaagaacaagccaagcaatgcttcatattcaacgagcagccatatcaggaaatgagagtgacatccgctcctcaatgtgagactttggaagttctcctaggatgttggtccctttcaatggtatatggtatagctccgagacctaatactatttacgaaggacttgtatctcccacggcgtgatacattgtatgacaatcacacaggtcatatattagcgacatgattattccaagagatatccaacatatagctattaggcttgtacaacttcagacagaatactattgtgtctatctatcacgttggattctagtgtggcattacccaaatcttaatcgaagatgcagtcaacaccgcgtagtgatgacatcgtaggaccaaacccttccagtcattacggtcaaacagatccgttggttcctttcactgatatatgcttgttcatacagtctgattgctcacctctgcacttccctttccatcttaccacgcacaccacgcacatcccgtggctttcagagccaaagaatgcaattatccgccctgtaacttgactgccactcattatgaaactcctcaagagaaacaggacgccatctccgttttacattaagtcttctgtctctccacgggatcgccggtggatctggttgcgctggctggggtatcttacctgtctggtcgccgttgtccaaactagctcatatctcttcgggtacccggagacagacataatccagactgtctatgcttcgttacagggccccggggtccttcggcctggtcagtatcatgggaatgttggtttgtgggacaagatagcaggcgaccactcacctgagccagatgcgttcggcatggcacatgatcggaggtttgtacctatcccaagcagcttatgcgtgagttgatacaagattatgctaacaatcaacccttgcagagacaagcgattctatcagggcggtaccctaaccctaactagtatcgagtctgtcaacgcctcgcacccagtcccacttgtctacgatccatacccagcatacaacagccgagaatggaagaagcgattctatggaaggttccagccctgccttggccccaggggccgtaatctcaaccggaggtctgcagaagatatgatgcaagtctacaagggtcaacaagccgggttcccagcagcgcgattcggatcgtacgaggcattgggcctagacgaaaatgtttgcacagaccgttactcccgctacggggcatatggttacgatgacgatggcgaggacgagataccgggcttcacgcgccctccctcaattccgtggtgcgaggttgattggcacagactgcaaaacctctgtctagaaagaaacgcagacagatacgagtccattgcgaccgccaattcttcaaatcagagtccactagcctttgaccttccccaggattctctcaaatcacgggagtcacctgcaggtgcttcgggtgtgaagcagtaccatcctcgctcggctgtgctgattcgggcttggaatgggctcaattggaagcctcaccatcgtgaataccttcgggccttgattatggaactttctctgcattctggtggggaatatcagatctatctactgtgtcatgtcaaggaggacgagatgcccattttctctgacatcaagaccatcaaccggctccggaatgccatcccgaaggaatttcggaatatggctctgttcttcaataacaaactcttagaggcttggtatcccaagatcgaagagcacaggtgaattaatcatttcccattgaccgatgttaaagacacccttactaacagcacttacagtccccaactccaacaccaccaacctctgcaaatattctcccagctgtacccacacttcgactactactggcagctagaaatggatggtcgccacacaggacacatctaccaattcctagacaaagcagtttcattcgcacgccaacaaccccgcaaatacctctgggaacgcaacgcctacttctacacccccggcgcacacggcaactggagcgaattcaaacaaatggtacacgacagcctatctgacaggtccaaccttacaatctggggcccagtatccggcaccgggatcagaccaatgggtccagtcccaccagtgccatccccagactatgacaattacacctggggtgtcggcgaagaagcagacttcataaccttcctgccaacattcaacccgcaaggcacgcaatggacattccccgacaaggtctggaacttcagatacggccagtacacgccgcgccgcgccgcggtcatcaccatgggccggtactccaagcgtctactcgatctgattcacaacgcgcaggcgacgaagggtctcggacttgcgtcggaaatgacaggtgtgtcatgggctctgttccacggcctcaaggctgtgcatgttcctcaccctatctatgcggatggccagtggacgccgaaagaactcgcgcgcatctacaaccccggtccaccggagaatgttaatggggctccggatagtatctggaatttcgatcatatgtttgaccatatcatgtaccggctgtcgtatatgtttacgacgcatagtgcggaagttttgtacaggcgttggctggggtacaggactgcggagcacgagggcgggaaaacagtgagtatatatattcgtctgctgttttgcttctttggaattagggagtgatttactgactcgtcttttctagatatccgaggatcgctacggtcgacattgtttcccgtctatgtttcttcatacgatcaagaacacggctccacaaatgggcccagacagggctgttccatgattcatatccatttacggtggttgacttgttgacatctcaaaattcttatgctttgacttatcggcgttgatgtagaaggcacatacgacttgcttcactgtctaatttagagaatctgaagtcatttgatatcatttgcaaattaaggaatcgcccattgttgcagttaccagactacgaagagatatctgccagggtagataatggttgcgccatgttaaacaaatcgtagaattgcactaaaaccgaactcttcatcgctgtatacaaaaaaggagaagcagtaaaggccaccaaaacaggccacgacgcaaaaaattaggcaacttatgtacgtgactggaataagctgatgaaccaaaagcaatttaccgttcatatgctctgtgagttttgataatccccgtcccaaaaatgaaagtagtccatctcatgacatcattaagaaccccggggggatgcctcttcgtctctatcccctggaattatacttctcgttgaaagcattgaccgctggaaagggtatttggttagcaaatgacattgtttagcatgatcagagtaactacttaccgacagcaatctgtctatagagccagttccgcgagctttcatcttggacaggaatgaaaggtccgttggcaccacccttgagcgtgatactcattcccgtgcgctccttggaaatggtctggatatccgtgaggcggatatcccactcagtatacagcttcttcgtgcgcaccagcatgatacgtgcgtacgtcaacaagaccagcatgtctcggccaggcagctctaggtgggcaatgtagtcttcgtcgaagtatttgccgtcgtccgtggtcttcagccagaactgtccgagagcttcgcgctgcgagtacgggcgcacaatgccatcggtgccaataaagcgggtgagtcgaacacggtcgagaccttcagcatcgaaaacagtagtggtgttgcgaacaccttctgccaaatctagtaggggattgttagtgatgaatactagagaaaggggatggttcaacttactagaggcaagatcgaatgcaccgatcgctggcttggtagccaatccaaggacaccctttccaacacctttgaagaatccttggataccttctttctccgcaccttgcagtggatgacgtgccaagccaccgataccgcttgcaagactagttgcaaaggcactgccaccagccgtgattccatacagcgcgtgcttggggcggttgcgcaccttggacattcggcgctggttttggaactccttatcaagtgtagcggcggcgagacccttggacatacttcccgtaagcttggccatactgtccgagaatccgaagatggacttcttcatgaagctggtagcaccctttgcgataccaagacccagctcttggggacggtcggtcatgaccaaaccctgatatggctcatagaagatagcggcgacaccagagctgacattgttgaacaaaccgacagggttgcctaggaagtcggccgaaccgagaatgatatggatctggcccaggaattcttgggtatagtgtgcacggatattggcgaccaggctggggaaagagacacgggcattctcgagcatcagagcattgagtcggactggtgcatcattgacattacccatcgacattgtcatgacgttgacaaagaacatcaacgggttggagggctgcatagtatcttccacattgacgcgctcggtgcgcatgaatgaaatatccatctgcattggctggagatgcaagagctcgaagtacacatcctgaccattgtcttcttgtcgcggctctggaatgttgaggtcttcatcgcacagtttgccctcttgctcctcggcccacgaagcacccggaatcttgacaaagtcaagcatggcaaggacgaagtcctcatccagttcaagtgtcatttgctgcaatagcaaggtcgcgtacttgatatacagaacaccatacgagtcgtccttaacccgtgtaaccattgcatggaagatcgggtgtgcttccatctccttgccagtcttcggaacgacactggggtaaagcaagatggggaaaataccaccgtagagctggttgtcgatctggatccatttgatagttgcgttcagagtctggtacaacctcgattccctgaacttgaactcaatctcgcggaatgtgagatacagcagctctttcaggttctggttgatcaatgaaattccaatgccacctaggcgaagttgggccttgaagttgacgtccgaattcatttccttgatctcgaacccagccgtggagccgacctgggaggattgtctactttgttgcttgtacatactcttcgacggtttgaagttggatagcacaagagtctgggtggggccatcagcagcaatgttgatgtcaatgatcttctggtgttcgccaggctgcgaagctggaatccgcattgggatcaggtttcctatctcggcaagtttgatatggcgctctttgccctggcaggtcaacacgagcgacttgttcttcgtcgccgggtagtcccatgcatacggcatgatgctccgcgcgggaatccgataccggatcggcctccagccgctagtctggtcttcttcatcatcatcttccacatttggattggcttggtagaaaatgaactccatatcgctttcgttacgcatggagaacggccaattgcgttgctcaaggctgaagtgcaagaaaagagttgctccttccatgatgatatcaatcttgatcaacttctgccgctggttcgccttggccaatttcacgtgcacggttcccacatcggcgatgttgaacggggaagaccattggttgttgacgcccgggaagcagaggcacagctgtttctcttgaacttgacgaaggaaatgaagcggtaccaactgcccgtttttgacctggagtacgttggaggagcctggctcgcgagccagaagatcttcgttgagcttgctctttaggatgaaccgtggagcaagagtgaccaccttggtcatcttgtacttgccctcgccttcagcaacagacactccggagtggaactcagatcggccttggcgatctgggaagatgacctcaaaggtactaccaatagcctcgaaactctgcggcttactccatgcagaatcgctgaccttcaagatagatcggttgctttggtcctcgttggcataagagtacatgtatggaagtgcgcggccctcgtctcttggatcggctctgagtccttgaccagcggcatttctcgcagattggaggaatgctttgctttgaatgtccataggaaggccagtcttgttcaagacaaggtatgggctgtacacagaaaccttgaaagcaccaccactgttaggaatgttgaagtaatgaagctgtaacctcagttgaagacctcgctcatccttaagagtcaaggtatgctctctgcggtagtcttgggcattgccgttgacaatagcaaattcgctctggcggaagaccgaatcttgcagatcaatgctgagcaacagcaagtgggaaagctccacgacgtgaaccgggctgacgccacccttcctcaagaagttcgtccaatccttcttggtgttcttgtcgtagatgcggtacttgaaatcgtagggcaacaggttctgaatctccacgggagcgaagattcggatcctcatgtagggatacacgctcgtaagcgaatccttgctatcaaacgttgcgttgacttggaaatagaaaggaggagcctgctgtccattttcgctaatgcacttaaccgtgcgtgtaggtcgcttgatgaggtccttccagaacaatcgctcatctgaccagtcatatccgaagccctgatcgggacgaacaacgatagaatggagatatgctgatccaacgggtgccggtcgtgcgtccccaggcaaaatcttctcaatcttcagcaagtggccttctccggggctgaaaatgcccatttccacgggaatttgggtattgttctcgataagaagtggcgaacggaatgtgatgtacttgacattatcgggtcccagtttgacttccacgagtagccggtgaagaacactttgttgcttcggcttcagagcgtagataacctcgccctcacgcacgacaggaatgcggctgatactatcgaagccactgccttccagtttgacaccaaccactccgccgtggccttctggggtcagcgattcacggatagcggtggaatcttcaaatcgccatggggcttcttcgccgtcggtaagtttcgccgccgggccttccactccttcgctgacatcggcccaaacactgaggtcaaacccagtgtagttgcggattctgtatggggcatcagcgcctcttggcttggcgaggacatcctgatcagtagaaaggaactggaaggatttggatgcgagtgcaatcgtggcggatgttatagtaagctccattgtcttgtgcgaatacacatcgaaagagaaaacatccgggttggtctccttggccatgtggaatcctagctgccagggctcaatcaacggctcccaggccgacttcgagaagttatacacattcatgaacgtttcgaagttggtatcggcattcagtgtcgatgaccagtcgcgtacatcgatgttgaatttcttgacgctccaatcgaccaaaggtagatcgtgtagatcaccaataagaatgactctaactccgtcgatcttggcagacatctcttcgcgcttgaggacaactgaactttgtggcgcagttgtccgatccaggtttccagctccttgactcgggcggttggatctcttaacaacggcagaggatgtcttgctagaagaacgccctctggttgtcttcgtgtccgtaattttcttcgcctctccgctctcagtctgctgggcattctgggtcatttcagaggccttgttgacaatctggattgccatcagaatatcacgcagagacaagcgaagaaccaaaggctcaaggtgcacctcaatggaggtcaaagcagatcccttatcttgcgatcggctatcaatggacatttcaagagtgaaatcatccagaatgcggagtcgagacgtctcaaacttatccatgcggcacaggaacatgcccactttttgaatctgcagagtcgacacattttggtgggagatgagaacttccttggtaccaaggacgatagcttcagagtgaggaatggcagggttggccaccataatcacctgagcgtcgacaagattgacccggaatgaaacggtcatagccgctgctgtggcatcgcccgaagaagcctcggttatagccttgttggaacttacaatagtatcggaccctgactcagactcctcgggtgattcgctctcatcctgcacctctattggtccttcagaggcaaatgcagactggctgaatgactgtaaagcagacagataatctaaagcaaacataatgcgagggctatcaatagtcagcatcgcaatgaggtgcttctctggtcctccagacatggacacgctagccatgaactgctgttggacatcgttgttgatcaaagacatgatgtttctaaacttgttcgagtcctgcttgcgactatcgcggatggagaatgaatgaatgaggagctccgactccaatgagccatctgtcaacatacgcagcttgactcgagtatcattgagagagaacttggacagactggagtcctctaggcggccgacgggctggtcgtcgtttgccaggataagctccaggccgacactgtcgaccttaaagatcatatcaagtcgtacccaagtctctctgttttcgtcatcagggaatgctcctcccgagccattttgtgcttggacggcctttgaactagcctccctagtaggttcagtcaccgacgagggcaacgactccatagcctcgagctcttgctgttcggtatctgtggcaaacgcgttcggtatcgactttgacagttccagcaagaacttgagctggctctgggagatacggaggttaattggagatagagaaccctcgatttccatatctgggcgtgggttgtttgcttgatgctccaaatagcagatgctgaactccaagttcaccttctgaatcatctccagctcctcggatgtaccatcttcgaaatggaagttggatgtcaggcgaatattgcggacaccagtcgagatgacgttgacagcagggctgtcctttccatcatccatagggacaaattcattcttagcataaatttcaccgaggtgagcggtgattgtgtctcgagggcgaccgtccgtcataacgcgagggaaaactacaatgggcgtcttcacaataatgtcaagccgcacacgtgaagcattctcctggagttggttggcctggctggcagcggcttggcgagctgcattgaaaatggcttgcatcttgccaaacttgacgaggaagtggatgatcttccggtagggctcctctagaaaattgatcttgatcgaaccagatcgcagatagacctcggaatcataaccggggtgtgtctcactatcgggatcgaatgtctcgtacttgaagtccgcgaaatcatctccttctatggtcagaaggcgtcggatatcagagtcctccgcggcacccaggttgacatcgtcgaccaaagtcagacttcctatccgagactggatgagcatcgagctgcccacgaggaaaaccccgacgtcggcagtgttcaaactcaaagttgccaagcggactccatcattgttgaggatgagagcaatactcttgaggttagccttgatgcggattttcccagcttgctcgggcttctcttccacactggcggtcccttcaatagccttgtctgtttctgggttgggttgagtcggttgttgaggatttgtgaatgtaaggagggtgaagtctagaagcgtgagaagtgtttttcttgtcacgacaagattgatagtggagactgatatgtcaaggttcatggcaaccccttcatacgttgagtcaaactcgggtgactcgggtttaacccgtaccatcttcagctggaacaggtccttgtcttcgtcggcatcaaagcctttagaggagatgattctcttgaattcaggaaccggattctcctcgatgtgatcatctacgcttaaagatttcagaataacctcagcgaccatgtcataggggcgcatataaaagtccagctcaaatccttcggcaaccagttcaaccagcaactgatcccgttgcgggtcatgggggtcagaacgggagagtgatccacgtagacggccaacagtgaatttgaattcgaagtctcggcgatggatattggccggtgtatcgacacgcttctttgcatgttcgctgtctacttcatcctcatcgtcgtcaacaacagggaggtcacgttggactgctggttggaaggatgatgacctgtctcgtgtggctagggctgcttcttccttggctgctgcagtaactgaatcagaggcagacttttccgtatcgaattccgggattgcaatatcaatcaatttcatcaagcccttgtatttggtgtctgatattgatgcgtgaagctctggcagatgtccagagatgcgcgttcgggtaagctgtgtcacgctcggtacgatacacatctccagggcaaagtcgacattgatacggtcgatgatgtggaaattcctagattcgacattcgtgttgagctgcgctttggttgcatcgacgccaggtccgatgaggacttgggtggagtccagtttgatgaggaagcgatcgtacatcagatgctccagttgcttgtaatcatcctccgcatattgttttttctgcttggactgaatttctcgcatcgctttgcggtcgaccaattcgctgttgacactggcatgaccggcgtcgataatcaaacaaagtgaacttggttgtgtgatgctttctggtacaataatcaaaggcgcgtggatatcgaattgcgcatcaaccttcttgtgttcttgcaaggcaaactcgaggccggcccgggtttgctgccgcagtccttcaaccgtggcacccgcggtatctaagagagcaccaatcgactccatgtgtcgctcgggcggctcaaagaacttcacaattcctacgaggaatcgagggttgtaaatgacctcaatactcttcagcttgacctttaccgccgtatctgcatcgctgtcgagcgggttcttctccagttgcagatggaacaaactgtcctcatcctgaagatcgtctgcgctagtttgtgaggcgagctcatcatcatcctcgcttagctcttcaacctttgtagattcagggggagaatccttgaccttgacgatctggggataaagagtcccggcagtagtgccatcatacatcttcagccctccaaggtccagatcaaggagataagaatcatggcgttgaagtgccttggctcggaaattgtcaaacactagcttcatgacctcattggctgacccgtgagggtcctggattaacgtaaagctaccagctcgaagactccaattgacctgaagtttgacccattcccggggcacatccacactctcggtgatagccttcttttcatcccaatcgatggcattatacaactcttgtcgctgttcttcagtcatagcagtctcctcggactcttctttcttagcgccccagagccaggcagaccatgattgttgttctgcgggctttttgaccccgacattttcttttcgtagctggttccgtgcaagtgagcgccagaatcggatatcttcgtagctcagttttgcttccagtctctgcagttccttggtttcttcgggcgtaaaagcctcttccttcttcgtttttttgaacaaggcaatgtacgcgatgcggtcatctctgcgctccttgatatagtcccaggtccagcgcctgtttcgttcgtggatcttgctcagaacggcttctcctgcgaacctcatccatgcccgagggtcttcctttggtgaggccttaggctggattttcttatgttcctgatggcgaatgaaataatggaatagatcgaccagcatcaacgcgtcgcgatattgtttctcatcaagaacaaagccgagctcatcgaagagcaaccgtgctttgattgcgggccgttcatatgtgcctgacttgtccatttccagaccagcacggccactgacggggcgcaacatgaattggtttccttcgtcggcatcaattgcagttctcagtttctctatcagatcagcgcggctgattccctgggcctctgcgcctatatccgagcctcgcccggttcccagcaatttggcatcagtattccaataagccgaaagagcaccgaggacggccaatttatgcgtgacacttgagtcggattggatgaaagtcggattccattccccgtctgtgctgacggcactcaattccttgagtgtcacgccgacagcaaacggatgcccaggtgatgcgatagagtcttcgtagcggaaatgcacattcttgatagaaatctgcaggttgtccaccacggccgtgatcatgctctgtgtgaagctctgattccggcgctgttcctcttggctcatgccttccgcattgcgctcgcgcagaatctcggcgctctcgacccgttccatcttcagcgcattctctctctttgcttcctcttctgggtcaaagtccgcatcttctctgggtgccgcgagcaggaagacatcttgaatatcgactttcaccggtttgcctcgtaggtttgaccatgggattgatagtgtaagctctccgagatggccttcgacgacgtttagagggaggcgtagctgatcgagcgcttcgcggcgtagttcaaggttccgtagcttgacgtcgcctgaccagattccgatgttgagctgggtcgcatcgaagttcttgacgtaaattcccaggaaccgattcagtaggttcgctactactccctccaacatgattgcggcgtggagccgttgaccgggcctggtggtcggactctatggccggtgcgggtgtcagcaggtggggattccacgatagtctgtaattgaagggatttcgcaagtcagtggcgatccaagtgagaggaaacaagggagcctcttcattaaatggactcttacgcgatagaagggttgcttttatgaaccctggctgatagggaacatccaagccatccaactgagagcacgcgcgatactgaggtgggacctttttcccctccaagcagagcggaaatcggtgaagatatgactagatgtcagattaagaagggatgtagagaaatcacaagcgctaattgagacaaaatgatgttgggtattccagcccaagttcaggcaagttaatggccctgattgcgtggatcaaaagaggtgatatctgttacgcaaattgtatgatcgaggtactcgatacaaacggggtacagcttcttacgccaggggcgggtatcattcccgcctaccaccaagtatttgcaaggtacagagtactcaagccacgatacacttggcactacgtgggaagttggggggccagtggtaagtattttggttacttttgttatcaaagccgtttacgcacgaggcaatgaccctgagaatccctgcaatatactgtaccgtatgtactggtggatacacttgtttaccccaggagtgacgtagccaccctggttagggcagcagccccccgaatttgattggctggggaagggacattatgcctgaggcaactttgtcgacacctgaggccaaaacttctgcatcgagctgcaatctgcacttccggtcgctgcggtccgccctaaagcacaccacacctcatcactcggtcacttcatttctggatattcttatttgttccctcccggaaagcccacgccgtcgactttctgatcaaagtctttttccgggtgtataccctcaatctccactcttctacttctgtccagcttttctttcaggccaattgggtgagtaaacactgctgtccggccgtacccgaggcttttctcctccaacttgctaacccgacgacaacgaaaagctctatatctccccgccatgtaccgcaacgccgccgcccgctccgcgctccgcgcattctcgagctccaatgcctccgtggctcgctccgctctgagcaagcagatctgcaaggcccagatgacctcgtcggcccgcagtctgctccgtccctccgtctcgtgcttcgcgctcgccgcccacaagcccgtcaccaccgctcttgtgcgctactcgtcttctgcggctaaggtgagatacggcatacgtcttgtgatttgtggtttgcaaaagacactcaatggctaatgtcgatacaataggagcacgatgatgatgatgttgatgttatggcgggtatgaagtccgaggctgtacgtatttccattcgatgtggatctgggtctgcatatgctaactgtgcctcgccgatatagaaagttatcaaggaaaccttcagcttgagtgaggtccccaaggaggccctctacctcggtatggccggtgtcgtcccctacctggccacctctctgcagaccgtcttcctctcctacgagatcaaccgcgctgctgctgttggcgaaggtctgatcttctctggcgagagtgctgagctgatgctgcacatgctcgagcccgtccagatcggatacggtgccgtcgtgagtgatcccgagtgtcttgagtaatcggttagaagtttgctaatcgccgttatggttagatcctttctttcctcggcgccatccactggggtcttgaatgggctggctacggcggtaagttcggttaccgccgctacgccgccggtgtgatcgcccccgctgtggcctggcctactctgctgctccccgtcgagtacgctctgatcagccagttcctcgctttcaccttcctgtactacaacgatgcgcgtgcttccgccgccggccgagctcctcactggtacggcatgtaccgtttcgtgctgaccttcgtcgtcggtgcctcgatcgtggctaccctgatcggccgtgagcagatccagcagaccaccgcctccgagcacagcatcaaggacaagatcaacgctctgatcttcttgcagaagaaggagaaggaggaggctgcggcccgccgtcttcaggcactcgaggtcgaggattccgagtaaatatgccttttaaggtgaggggcatccccccgagactgatctcgatgtttgcattaccgtgatttcctgtagaatatacgcagaacgaacgcactaggccactgaaatttcttttgttcaattgaagtgtcgtagttgggacccaagtattctcgagtaagagtcttatcgtgagggatttgacattccgcatcgagtgggggtagatataagcgtacgggtagcaggatataggtatccatgggatgctcccgcattataatttcatttcttttttcttttttcttttctcaaacggattcaataaagctacactcgtgcttggcatcaaatctgagttagagctgcaagattaggtacgtacaatagctattatatgtcgcaaaagggtacaattgctaatcggcatcttcctcaggtcacacgggttgccgcagatcggagagggataatccaaaggggtaaaacgaatctcacgtacatactcgagcgggtcgatcccattgaaactgtcacggggtgccgaaaatatcgactaaagatctcacggacggagctagctgaaacggcgctggaaatgggaacaaaaaagagggtacttttgcgaaagtggcatggctttctttgctttctttgcttgcaaacggcttcgggggaaggtaaagcgagacctgcatgcgaggtacgcagagtagcgcccaatggcgccagaaaaaaacaacgctggaatccacctggatcggccttttcgtctctttttgtttttttgtttttgcttattttttctttttttggggtgttaatctatggagtacaactgagggagcacgatttttcgtattgtaagttgtacttgttcgcacgtccccgttcctggcaggtttgacaacatcccctctctccacgtctggagataatggcctcttatagggcaattcagccggttcaccagaccagttccagttctccgtgggggaaggaaccttggacattactagataacgtcatctgctggggttatacaacgtacagattggactattctacatcaagcataaatgccaatctgccaatctgccctgagacagggatcttgaatgagacccgggaagtagggagtcaagatcataggcagttccccggaggggttgacgcactcgaatgttcttggcctggactagcccgttctccagatgggattcccttgatttctctctccctcataggctatataccacatccgagaaagctaataattcaataattcttccatatggtgggatatgatattctccatgaataggattttaatcaaagaatgtcaactaatcagaaagggggggggttctagaacgactcaagtgaggaaaaatggaccgtgtcatgtgtacgatcgacggggcttgtggagtgcccaggcttggatagacgggggttggagttgtatatgtgtaatatatacggataggactatggtaggtaactagttcactagttataggacaggatagttataggataactataggatgggtattactagatagatgctcgctacaataagatatataccctatataagactatatccttaatccttaatcctataaacgtccttctccagctcatctcccatttataaagccaaatagtgggggaaagtgacgaggtcttctgatcaaaaaaaaaaaaaaatcccccgaaccggatttctcatttcccccaccccacctgggctttttcaatggtccacccctttggttaaagaccgctgccctggtgctgtgggagatctttcttgttttctcccgattcttccgttttctctatatacgactcgatactggcgtatacctcgactatttacctcttctcctccttcttctgctacctttcaccaaccctcaacaatttccaatctccaatctccattctccattctcacctttctcctttataacggtgacagtgaactgccatatttcacttctataccttggccactgctctgatacgtcacgctccacttttctgccacgggagctggtccccgtatccccaacaccgccacctcgtagttctcctcccctccgttattcccctctttaaatcctggacagtaaaatcgctctctctcttaatacctcttttttcacacgttctggaagatgcgaaacccattcgatttggactttgatagcctcgatggagactccgagcccgcccgggatttcgaggcccccgaagaacatgtgcaccagcgagtggaggacatacaacgagaacacctgaacctcaactatcgtcccaaacagagagacgatggagaccggtcgttgctgcaggacgaggacgaggatgaaatgaagagtcgattcattggcaccattgaccagggtacaacgagtacacgattcatcatcttcgattgcacaggtgtccctgtcgccaaataccagactgaattccatcagattcatgaacatccagggtaggtgtcacaacccatccctttgaatcctcccccgactcaaatattaatttgccccgcacccccacagatggcacgaacaagacccttatgaattggtcgagtcggtctatatctgtatcgaagaggccatgaaatccttcctcgccctgggctactccacatccgacatcgaagccattggcatcaccagtcaaagagaaaccgccttggtctgggactgggagaccggcgagcccctgcacaacgcaatcacgtggaccgatactcgcaccgtcaacttggtccgggaactgaaagaaaggcccggcgccgacgaactccgtgatatttgcggcctcccgctctccacatacccctcgtccgtcacgctacgatggatgctcgaccatttgcccgacgtccggtcggcctatgacgatggccgcgctgcatttggaaccgtcgatagctggctcatctacaacctcaacggtggtccgaagaacaagcttctggtgaccgatgtgaccaatgcctcccggacgatgttcatgaacctcgaaaccctccaatatgacgatcgcctcttgaagttcttcgacattgacccgaccaagatccgtctgcccgagattctgccctcggccgatcccgatgggtttggtagaatggccgaagggccgctggagggtactcccattaccagctgtctgggtgatcaggcttcggccttggtcggtcactgtgccttttcgccgggaatggccaagaacacttacggtaccggatgcttccttctctacaatgtgggcgagaagccggttatctcaaaacacggtctcttgggcaccgtgggcttccaattaggccgagaccgcaaggccgtctatgcacttgaaggcagtgtggccgtggcgggcagtggtgtctctttcctaatgaataaccttggatttttccgtgactcacggaaggtcagcgatttggctgccagcgtgccagataatggaggctgcattttcgtcactgcgttcagtggtctttttgctccttactggatcgatgatgcccagggaactatctgtgagtcttgaacgtgctcgtcatccaaaaacctaaatcgctaacactgccagggggaatcaccgcccacacacaaaaaggacacattgcccgtgcaaccatggaagcggcctgctttcaaactaaggctatcctcgacgccatggcaatggacagtggcaagctcctgacagaactggctgttgacggcggcatgagtaactctgatatttgcatgcaggtatgttgcaacgtgttttctcttaaactctcagacccgctaactttcatttgtttcagacccaagccgatattattcaaatccccgtcgaacgtccctccatgcacgaaaccactgccctcggcgccgcaatcgccgccggcttcgccatcaatatttggaaggatttctccgaacttaagcacatgaaccgtgccaaccgagcctccttcgccccaaggatgtccgtcaaagccagcggccgcatgtataaaaagtggtccaaggccgtggagatgtcgcgcggctggatggccgacgaggacagagaggaatacgacgaataaacaccttttttacatatccttttgagatgaccccaatcgggtccgtcatcgaccccgcggcccagtttgtgcaattcataccatgcacgatacatacacacgcgcaagaagcaagaagcaagagagatttgagaggtttacatgaagatcatatcaaccggatatcgcatatattctctcttggagatacccggaattttttctttttcacagggacatctggaacacctcgcgtcttccatttatacatatttagagaatttccaatcccgactagaaagtccgtcctaataaggcgttttacccgcccacgccgatgtccccctccaatcatgaccgttatgacgggaagtcgtttgttccagaagaagagctggggattttaccttttttttttttatctcattttgctgttggctagcttcctctcctggaacaagctcgacttaactaccacttgtgtacatacaacccgtttttgagaagaaatgaagaaaaaaaaaaattataaacatgtcattctcgttcgtacgcaaataaacaatgaagcttaaaactttattattacaacattcccacccggaatcgagaataccccggaatccagtttctgtctccggattgacgtaaacaccatgacatcataacagcggggtagtaactaaccaagattactggttactggttctaaccaatagtggagtgagacatctggttcattttttagttcggcgatgtgttcaatacatacatagcttttcagatcacatgatcgcttcagcctgtggtgtcctaccatacatacatagtgaatagatcgtagaggcttcgctgttgaacccttggaagtggctacgatccatctaatgcatgtagagagggatgttgcttgggtcatttatattcccctgtcacggcttcattcacggaataggccgagatttggctgtctgcttagggtttgggttgttgctatatttggctcgggtgccttgggagggatatatattgtacaacatatgttcatctacatgtacaacatacaccgaagttggagtggaatatatgtatatttttattttcatgctatatcttccctctcggtcattttcatgaccgctttgtagatataaccatatgtctatgagagtaccaaagaggattggcagctttattctacaaatgcgatcgcggatcacgtggtcacgtgcaagagggtatatagatgacctcatatcgcggttattacatggcaaattgacgtcagatgatctccattcgagatcttcaagcgcggaacaacagccgataaccagagtcaagcgtcaatctgactgagacatgatatagaagaaagagaaccaaagagatatggtattttcaatagacgcctggatgatcgaggatgcaaaatggagatgagaaacaggatacatgggtggttgtttgtagagccaacaagaaaataagacaaggaaatgaacagaaaagtttacagagtcggagatgacttattcattgaccgtgggtgctcttcctgccgccgcggacgagttgagattggtcgactgcaaagcttcagggagcttcagcggtgcactgggcaagatcttgagtttattgatcttctcgcccttcagcaccagctccatctcctcctttgtgagagtttcatattcaatgagcgcattggtcagaagctcgagttccttgcgcttttcggttaggatggtggttgctcggtcacgggcttcttctataagccggcgcacttcgccctcgatctcttgcttggtttccgacgataggctgtcgtaattcgtagacaggtcgacgttgccgagtttcttggaatatccgaaccgggtgatcagcgtgaaggccgtctcggtggcactttgaatatcctaaagagaccattagtaccgagaaaagaagacaactaactagtaagacttacagctgagatgccactagtgacattgtcgtggccgaaaaccagctcttcagcagccttgccacccatagagacggcgatgtctgccaaatattcggtgtagttccttgaaacggtatccatctccggaaggaagtgagtaatacccagagccataccacggggaacgatggtgatcttgtacagaggagtagaggaaggagagaagtgtgcaacaagggcatgaccagcctcgtggtacgcagtcaagagcttgtccttgtcttggatgatgcgactgcgagcctcggcgcccatcataatcttgtccttggcccagtcgaagtcgaacggccccacattagccttgcggtcacggctggcatggacggcagcttggttgaccaggttctccaaatcagcaccagagaagccgggagtgcctcgcgcgatgactccgacgtcaacatcaggaccgtattgaatttccttcatgtgatgtctcaagatgtccattcggccgcgaacatcaggaaggtccacaacgacccgacggtcgaaccgaccaggtcgagtgagtgccttgtccaggagttgagggtaattggtagcagcaatgatgataacaccggtagtctgagagaatccgtcgagttccgtgagcaactggttgagcgtttgcttgacataagcagcatcccgctcgtttcgctttccacctatcgcatccagttcatcaatgaagatgatagccggagccttggcacgggcctgagcgaacaaatcacggacacgcttggcaccaacaccgacgtatacctcatcgaattcagatccagacatgtagaagaatgggacaccagcttcgcctgcaacagcacgcgcaagcaaggttttaccagtaccgggaggaccgaccaagagaacacccttgggcagcttaccgcctagggaagagaaacgctctgggttgagaagaaattccaccagctcctgcagctcatctttagcctcgtcacagccatgcacatcactgaaacgagcggtttgctgctcaggctgagcttccttatcctgcgcaccacggacgttcttcagaacgccagtggtttcaaccaagatagtgaccgtgaccagggagatgtaagtgaaaaagccgaaaatgagcaagaatttgacccagcggaacacagtgcttccgagagactcatcgaccacaacgtagagaggagcatccttggcaccggtaccgttttgttttcccattccgatttgactgccagtagcccgagcagcgaccgcttgaccgactgcctggagctgttcagggctcagattgtggtttgacccgccgaaagctccagctccggcgtcggcgccaccgacgattgactgggcctgttggactaatgcttcagttgtgagatctcctgcaaaataaccgctccggtgtcgttcgagaactatgcccggcattttagcacgcaagagagccgaataaagagcattttgagcgtctgcgttattgggactttgattggcgaccttctccttctgggctagtacatgatgccaggacccgccgaacaggaaccgttgctgctgtatcttcgaaagaccgttgaccttcggggccgcgcggagggagttaagacggaatggagttagagttgagtatgaacgagcaccggggatagcatagcggatcggcataaaagatgaggtggtccgaagtgcgttgtctgttatcaatgattagatatgattcatcaaagcaattttctcaagccaaaacatactttgattgagcaatgaagaccacgtttgctgcgaaggccggctgacgatctccgctcgcagggcttcagtggaaatgccttccaggtattcaggcaaggttgcgcgttgagagatctgtctgtatcagcatgaagatgccaagtggatgataggttatgccatactgtttcagttcctcggctagtactgcgccggaaagactcgttgacattgctcgtcgttcgcccggtctgcttccagggaacagccaggatgttatacattgaaggccagagatccgatgtcacggcagcgacattctagcagattttttgggtcagttgtgggatctggatgagaaaccgcggagtggtactcacaggcatggggatcgagacttggaaggccatgactctccgatatacagcggcacgcggccgggtgcgaggatgggcgtgtgctcctcttggtggatttacagccggaaataaaatttgaatctgttaagcccgggttgaagagactgtcattgctgacacaagaatgaaggtagagaagaaggcgataggatgttccgctttgatgcggcgaatggcgacggccacttatgtccgaataggcgaccgaatatatatcacgtgatattaagtggcacgtgcacggcatagccggacgcttcttatagcgtcatcagctctggtcagctccgatgaaggatggaaggagatttaatggggaaaatttgtatgaattaattatgcatgggcgatttggcagagaaaattggtagcaaacgggtaatagtagccgggaagggccaggtacaccagggctgttgccattgacagaagctgcccatggttcgcgcaccccgatctttacaaattgcaacgtcttgacgtccacgagcatttgaacttcatcaccttcttgaggctcttaaaagggccctgtgatccccctgctcgatggctccatcgacatttcggcccacgctttttctcacggacaagctccccttgacctgcatattcttaaagacagacttgctatgtctcgaaaatatatcttcttggtaggagctccgttgccagcaagtctgaattgggatacagacgagcttctcaacacgcccatacctccattttacgagaatacgacgagtacagaacaacagctatccctggagcaaccacctgtaagatggagagtgttacggtcagcatcagtcgacaagctaggtgaaaattatgactctttccaatactatgaggacccggcctttttcatctcgcatcaactggctgttgcgacagatgcgacacaaggatcagaagattcgattcttcaattctacgaccattctttcgccatccacgaaacgtccgaggtagctggctcagatgtgtacgtagcagattccacgcaggagagcagtttggacgaggacagcatgttggctagcactacggggctggacaagacagacactccgaggtcacctcgcattctccataatcctgggtccctcattgatttgaaagatcttcccacggccaggtacatccaatcgatcgcaccgcaaacgatgacggtgaatatgattgtgggagtgctggccgttcaccccccacgtcgcatagtaacacgacaatggaaaaccgaactggacctcatcgagcttgtcgttggagacgagacaagggctgggtttggagtcaatttttggctcaagccagagaagccgaccgccaaaaacaatgaaccggatcgtctaggtcgttcattggcatcacttcgacctcgcgacatcgttttgctccggaccgtcggactcagtacattccaagaccgggtgtacggacaaagtctgcgccgagggatgaccacggccgagttgttgcatcgacaaccggtggatgtgacggatgcagttggattctatcagggcagaatgcaagaaattagctcccaggatgatccgccggcccttaaggcccgcagagtacgaaattggatgctgcggtttgtgacggattcggttggaatgtcacatccatgtggattacctccggatacgcagtagttagttaattggtcaaagtagtaactattgctttcatgctttatgtgaaatgttaacttgatatccgtaggttccgtagagatgtgtctttagtgtacgtactagcgccagaccaattgtatctgaaacggaagaggggaaacagggaatatccccccaccaccaatctccccatcacctacggaggactccgtatatgtaggtttcaggggcgatacctcatgaccataagaatttgaggtttagttttgcgccatctgcattgtcgtataaatcatgcaatagcattggacatactggccggggatggctgaactagacctcaggagatcagagacttcatccacgcgtcagagcggcctagttccttggaatgtaattagaggaatgcctaatccattcacagcaagcaaagtacaaagtcatttcatcccaaacatccaaaagcagtcaccacagctctaaacagccgaagtcgaagtatatggcccccttttcccgcaaacaggcccctccaatcaccgccactcacgtgcccccacttggacaaaaataaatccatcaacggccaggtgttccctaaataacagagcgtctctccttttgcttctcctagcctctctactctattcctaattttctctaattttcactattactttcaattccaatacatcatgaagggtatgtgctattgtcaatgcttccatgtctccccgctaacccctctacagctctcattcttgttggagggttcggaactcgtctgcgtcctctggtaaatatcccgatgattatcttatggcctattgtctatttggcaatactaatattgatttattttagaccctcacccttcctaagccattggtggagttcggaaaccggcccatgatcttgcaccaggtcgagagcttggctgctgcgggtgttactgatatcgttcttgccgtcaattaccgcccggatgtgatggtcgcagctctaaagaagtacgaggagcaatacggagtcaacattgagttctccgtcgagtccgaaccgctgggcacggctggcccgcttaagctggcggaggagatcctaggcaaggacgattcgcctttcttcgtgctcaactcggatgtcatttgcgattaccccttcaaagagcttgccgaattccacaaaagccacggtgatgagggcaccattgtcgtcactaaagttgacgagccctccaagtatggcgttgtcgtgcacaagcccaaccatgcctcgcgcatcgaccgctttgtcgagaaacccgtcgaattcgtcggaaaccgcatcaacgccggtatttatattctgaaccctagtgttctaaagcgcatcgagctccgcccgacctccatcgagcaggagaccttccccgccatctgtaaggagggccagcttcactcctacgatctcgagggcttctggatggacgtcggtcagcccaaggatttcctcaccggtacttgcctataccttacttccctggccaagcgcaaccccaagatgcttgcccctcacacagagccttacgtttacggcggaaatgtcatggttgaccccaccgccaagatcggcaagaactgccgtattggtcctaatgtagtcatcgggcccaacgtcgttgtcggcgacggtgtccgtcttcaacgctgcgttataatggagaactgcaaggtcaaggaccacgcttggatcaagtccaccattgttggctggaacagctctgttggacgctgggcgcgtctggagaacgttacagttctcggggacgacgttaccatcgccgacgaggtatatgtcaacggtggctcgattctgccccacaagagcatcaagcagaacattgatggtaagttttcgtttctgatcactatccctaacaaacatgtactaattaattgtacagttcccgcgatcatcatgtaatccttttcctacttccccctcttccttcacgtcgctatgccttttgaaatacctcccttcaactctcgtgccgataccaccctccagtccgccctcttgatgcatagaaccggagtcgtttactgcgtttcttctgtcttctcttctattgtcggcttgcctttttcctccttgacggtttatcgccctcacaacttcctcccttccgtccgataatgcacttagaaacctagatggtgaaagcgtgcgatttcggctgttttgcaagaaataacttcttttagttttgtttgtctacgtttatccttcgagctatccccgttttagtgctacatattgagggtttcgtcgctacatccccgctcccctgcgcttggccacttgttttcattcaattttttcgatttttttttttactactgctagtcttctggcaattgatgggcaaagaaatcatgccatatccgttttaatgagaacatgggcgtgggctggttctgttgatgtaaataatgggaggcgaaattcgcaaaaaaagatacaagtttagttgatctttaacacgattcttcagatgtttcatatcagatatctttgtagaagtatcatggatggaatattagatacatatttggggataaattacatacagtcattgaagctgttctgcttgaatcagttaagcaggaaattgacttgagagaagcataatgtgtctttgacaaagtcgtgtctaggaatgagcctcagctcgatccaggatctcatcccattgaattctcaactcttccatctgcttccagcattggcgtccgagttcctcgaactcttctctcttttccttggtaagatcttctgcgccgcgcttacgacgtcggagccgatcagcctcaacgacgggcgtgccgacaacacctccatgtccccagccgtcgacctcagtagaaaccgcactttcaatgccaagacgcccgcaagacgaaccccatttcgctctaccgccaccagcccggtggtaaggctcttcggcagcttccacgtcagcctgcgatgccagcgcgaggaagaccggagcacaagcgccgaggtaagtagacaatggatgccagggcgagcccagcatcctcgcagtccagaaagcagcaatcatcgcccacgcaaggggcagaataagcgggatgatagatgtggcgcagataccagggtgagaaagatacatgcgcggggtcgcgtcgggggcatttgtgtggatagcatgtgtgtcaagttccgtctcagactgcaagaagctatcgacaacccagggggccgtactcggcagattggaagtcagcgcgaggatatcagtgagagccttagaagactcatacggcgcatcagtgcgcaaaccctgaatatcgtctattttgaaaaagttccaagtcgcttcgagactagaaacccagaccacacggccaggcccgttcgtgtgcgcccgcttcagcagcggaaccaggttgtgcgccagcatatagtgcccgaagacatttgcgcaaaagactgctccgagcgcgggctcttcttccgtctttgtttgcttgtttgttaacacgcccgtcggcgctagcttataggatggccaggtcaccgcgtggaggagatcggtgcaaacctcccaaatggccgtgggccaactgatgccggaccagccgcccagcccggcattcagaacgatcgaatcgagtcgggggagagtgtgcactagttttcgggaaagttcgcgcactgagcggagatcgccgaggtcgacgctctctgagacgaagtggacgcgcgcggcggcagatgcggagggggaggttgcttggaggtgtgcttctagtctgcggattgtgtcttgggctttgcgcgcgcttcgagttgtgaatattatggtgagagattcagattctgcgtgggaggagaggaattcgtcggcaaggcggcagcatatggagaatccgaggccgctggatggtctgagttagtatagggaattgagctgaattggcatattgagaggtttgcacctgttagcccctgtcaccaggatgtgcaacatattttgctgctcagcggacttgacctgatccatggcttgttgcttcggcgagtttgttgactcggcaattttcttgatatcggagataggggttaacgtgataagatgctcaacgattgaagctgaggttggagaggattttgcgcgttgtcgcaatggaaaagacacgcggcaatcagcagcacctgagatgaaatgaatcccccgaagtgagcactgtcaatgtctcttgtcgaaaatccaccgaacggggaaagtgcccatcgcacagatcacgtgttcaactttaatcttatcgttatcggattcgtagtccacctggacgggttgttccaaggttcccgtcatactcgcttttcacgttttatggctgagatctgctaaatcttacccaaatgtcgtgcagctggcatacaggaagccatggtagtcagacttgagcggtttctcaacacaaccggtttcttcttcttcgctatcgtccttttctgcctcatcctccttacaccagcggacgccatttaccaatgctacgagactaatcgactcacaaacatcttcttcattaccggcgcatatgtgatcaccttcctatttgcagtcctcatctatgcgacacgcatctacacgaatcgcagtgcactcaccggcatacccaaagcctggatccccgtggaaaaggaagatgtgaacaagagcgttaggcgactggtaaaggaaggcctcatccgtagcgccgtcatcgcctatcaagcccgcccacgcgacgtctccaccgatgaggacagcttccaaaaatacagatcgcttctcatcgaccccgaacgacccccatggggccatgtcgagcaccccggctggtcttcgccagactcgccagacttaccgaatctaccataccgcacagtcatacacgaactccccagcttgattgaagccaaagctgtctcccttgcccctattgattcattatcatctgcgcccacataccacttcgatccgtcaggcgaccttacgatacagtctctcccggatacacgcgtggtggaagtattacagcgtccagcgtcaatgggtctgagagaatatatccgccatctgacgtccctcggggctatcaatccgccagaactcggtgcggatttccttgcgctgtacgaacaagccagattctcgacgcgcgatctacacgagacggaattccgcgacctgatgcacctcttcgcggagattctgagggggatgacatcccttgcaccaccgatcctggatgaaattcgcgacagcgctagctcccggcgagcctatagcgaatctagcattgaatcctcggatgatgagagagaaacagataccgggacttatggttatgacgggactctagggtacatgcgaagtaacagccttcgcccatcgaatacgtctacctgggagacccagtccgggtatgacactgcgcccgcaaggcaagatgccgcgtctgaattgtcaacggacagtggatcctccgtggcacgaagctttcttcataccccttctacgaggtctctacgacgcgtggcctcgggccaatccggcagttcgggagggagtgttattcgtctgaggcagccacgagatccgacagatttgccgtatacaattgactacgctggacgtaggcaatgataataatccattcacacttgtatattacctatagagcaacgctatttggacacgcaattgcgccaacggaaccttggaagtggggatggacttagtcaggcggaaaacattccgagtcctgtccttggcaaaacctgcaaaatgattgataagatcagtttatcattcgacgactcgtcatcagaaaaaagagtccaaactagcagatcttctcctttttcccattgttgaagaagatatccatatcgtgtaaaatgcatctctttcgccgcgggacttcctccctctttagctcctccaatgtctctgccgcctcctccaggaccgacatcaccaccgacgctgtgggtgacaataccctcgctgcagatggcttccaaaaagtctcgtcgagcgataagctcttcaaaaaggtcgatccagtggtagacggcgaagactgcctgcacgactgcgcgacatgtacgatcaaataccccgcaaaattcgatgtcgatcagcaagacgaactatacggacaagtcaacggatgggcgacacatatgctcgtcgcaacgggcaagtcagattgggtgagagacgtggcagacgagaaagggagcgtcatggaagccattgaaaagggaggactggagccgagcaacggggtatgacaatatcccgacctgccaaagtcaatgacatagagactaacaaccccttttcacagcgactcaaactgtcagcatccaacatgcccgtcccagacgaataccacatagccgacgcaggcaaacagctcacaaacgtcctcctgctgccgagcttcaccgtcgtcgaggacgtcaccccacagctagtcccagatttgatcgagaatttcatcaaccggaccctaacaacaacaacgccactaggcgcaattccagaaaaaccaacagaggaagaccaagaccaagaccaagaccctacgcaaatagacctcccacacccatccacaacatcaatccccacttccctcaaatcccaccccagcccgcacgcagccgtaatcctgctctgctcgcaacgcacgcgtgatgcgcgctgcggacaatctgcacccctcctgcgccgcgagttcgagcgccacctgcgcccactcggtctgtaccgcgacatggacgaccaacggcccggcggcgtaggtatctacttcatcagccatgtcggcggtcacaagtactccgcgaatgtgattgtgtaccgccgccgcgacttcgattggtacaagcgggatgctcctgcggacggggaggggcgggcccctgatgagggtgcggcgcagggaatctggctggcgcgtgtgcggcccgaggagtgtgagaatattattcgatatacggtcttgcaggggaagttgctcaagcccgggcagcagttgcgggctgggtttgatcgtgagcgtggggtgacgagttggtaaagttcgagctgggttggttagttggtactttggagttggtttagtggatatcacggacatattgctattctcggctgaggttgattgcctgatgtatctgatttgtgcttttgtcttagtattctatacatgtggcgctgcgccccaggtcagatctgccttgcgcatcacgctaatagctttactccgtattcgcaggctctgtactccgtattgtatttattattacgattgtacggatttcagaaaagaggtgtatgctggaggtatctccagtctcatcaacccttggccttgtttcgcttcccgtgcctcacaggatatcattcgccacttgactacagtgatatctatgtatacttctattagatgaaacatctaccaacgccgacaagcaatcgatggctatagctgctcaggctccagacacgtgcaccatgtcagccatgcaagtcagattgcaaggtcggcatttgtcagccctacagccatatcaaccgcaaatgtcggatctccctgtcttattatagactataactagtttgttatgtatgaaaggagacagacaccttacgtaaacataaccaagtgattacctaacctcccacctggaccgtgcaccggtggacctcccgtacccggcggacctcagggggcgtgctcaattttactcggacggaacaccactgtatcccaaacatccaccaaaggattataaagccacgctatcgactgtgctccatagcacgttagttgcagcaaaggcgtgcatgcgtacccgacggccgagacggccctacaaagaaaaacccatagaaaaacgtcatccactgcgaatgagcaaggttcattgcccatgactggactggcaaatgatgcaaggccaaggcaacaccagccgctagttatccctcaaccctcgggtttctcgctcgccaggctccaccgggcttgtttgaaagtaacctgggacggtcattgtacagaatagagccgatgttcccccgtgtgttgcggttatcaacgcccccttgcacggaaaacggtgggttgcgggaatttcgtacatattgttgtcttatttttgcgggggaggacggaatcagctccaaacgccaaactccaatacgtcatttctgggttttctttcgaggtatcttgtatcttctatatttacatattcgtgctagataggagctcggagatagtgtctcttacggcaagacactcccgggcgttcagtaaggaggactgaattcctttgctgtcagccgtgataggggcttgcggtaagttttccgctgatttgatcacattcttctcttcttctcactggcgttgttggctttcagaaccaacatgtggtgtctaacttcgaaaccagagtcaaaatacctgcaaggggtcaagtggtggctgttcgccttgtcgcaacatcctggccggtaagttatcatcgagcgctgataggcaaagcccggcgttgaccgacattcgcgcaacgagagcgagagaatgcgaaatggcacagaagggccgagaaatgcgaggaatttgttccggcctattccactccggggatattaacatcgatcatcgaccgtacgcacgcttggagaaaacatgaccacattcataccgtctaccgcctccttggtgagaaagctcgcggagtaaacagccagattgccgaatcagaatccacaggtttcttagcttccttaggtctaaagtgggggatatggatagtccaatgagctgctctcattactgcgtcgccatgcgcgcgtcggagattaatttagtggcttttcggagcatgtggaggatatttgttttggtccttggagctggtaacctttttcccaatcttcacatgggtataggtgatcgacatggagatatgtccgatctgtttatttcacactgtgaatccgttttgattggactccgtaccaggtactccgtacattcgaatgattcatatttcgtatacgaccaattaccaacaattaccaacgctgttagcggcagactgagggccaaatcagagagctccccgacagcgtcatatcctctcttaatcgccaagatgaaacaaaatgcggggtagtcagagcttctcagatcaagggaaataggtagaggaaaaagaaaatagcgaaaattagagtcccttatcgaactctatggtaaccgcttgaaagccattgtccttgcgtgatgtgatgcgcatgcagcttcgaacagctttgcaacaacttccgactcccttctcctgcattttacctatttcaatcacctgggcaagacggtggagttatcaatatccaaattccaaatatgatatggcccccaaacgagcccgtccctatttggaagccatccactccacaaataagactagtcttagtagtctgcacgcgagaacaaagaatccggacaccaggctcatgggtatctctgaatgacgcctcatttcttttatcctttatccttttttcgcatgcaagcacaccggtttttgattttctcttgccctactagccgcgccctgctttacggcattactatagtgtatggagtatggaaatatgcatatatgcctcaagtggagcatgcatgtgctgtacctacctgatcaccctacacttatcatagccgagcgattaccgtttcatgtagcgtgtattcagggaaccgattaatgatagtcgcggtttatctatgatcggcggcgacattggcgctcttttctgatcgggggtttctgttcgatgtttcgtgttgacaaatctggacccttagggaaatagtgggctgtgcaattttatgtacactatacaacatacaatagcatttctcagtataatctccattcgttcttacaaccgtttatccccataattcatttccaataatattttgattcctatgtcatgttcgattacctcaatggctgagccgggctgtctccattagccactcaagagcatttgtgtgggtccaatccacacattctgcttgcctcgtacactgcgtgcatcatcacgatccggatatgcagcactattggtccttcgaacgagatctacttcactccgcctaccaagtaagctaccgcaacagatctgcacacgttaggcgaagctcttcgaagtactttatacatccctccataccttgtaaacagggtttgtcgatcacgcaaagcgagcaagaagtgaaaaaaaataatacagggaatctataggtcggtcctcattactctggtgtattaaggttgtaagatcagaagatcaccgcagtgaagatgagcgcgagtggattgccacgttcagtaggattaggaaggtagtggtggtcacccaaacgcctcttctattttcgttcagctgttggactttgccaggagatctctagcccgctctggcattttcggctctgatcaccgtagttgttgcgcgaatctcgaagcctcttgcgacaccttttgttgagtttatcgattggcaatggggacatcccgcgctaaccgagtctacccgataagccttgtgaggcgacatgctatctgttggatgctgagatggtttcgccactggattttattagaaccaacatgagaagctaagtggtctatacagcagactttgggtgcgaagggagctaagtgatcgacccagctatggataaaaagcaaatattgtgattggcgctacgggagtacggtgagagtagtgcctgttcagggatagcatgggtatatcaaagtctatggactgaccatgtgaatgtagaagtacaacatataacatataacatatacactacaatatacacagacacagacacagacacatacaatttagaacaagtggagagacgggaacagccccaaccttaagggaatgggacccgaggccttggggctgttcggggtggacaagcgggagagctggggtacctgacccatttgcgaacaccgttacggggtgcagacgccgcgtcatagggcatcccttgcatttgtcgtttctctcttactgttatttacttcttccgagagtaatgttgcaagtgtttttgtggttctttgtttatggagacgcggatattaatggagtccttctagaccctagggaaattacttagtacggagttctgcaccgccaatcccattgacttcctggagaagatcgtttttagcgtcggtgaccttactccgtcgtgaccctctctcatttggaaactagatcggaggagttcggccgcggctaaccttgggaaattggcttggcttgattgtgtaagttgttatttgggagtcgttgagtggacggattcccgagcccccccaatgaatggagaggtacatagtacggagtatatatcatctacacaagttatttggtggcttctttagaagtgtaattgtatacagtatatatttagtctcttatacaatattatagtattatagttaactagtcaccaagttagttaggtagttcgatattaaaggggccaagaactggtttcaaaaatacggtcatatacaccgtatccataccataccataccatgcccagtccggttagcatgtcttgtcattcgggggccgaggtggggcatttggtaaataagctggtaatgtgggggtttcttttttccatgggctatcgcaatttaccattttcagaggtatcccgttgacagtcaaagtttgagtctgaaggtttggaaataaattacctccacaggtattagacggtttgccgatgtgttaccctgtcgagttgagacatgtatttctttgtacaaattgggaatgaattagggaaagagagtgtcgagctaggcagtgatatttaagctgcgagctgataggcctgttcgtatataggatatatcaacgagtgtacctggtacctcagggaaataataatataataaataatatatatataataaaagaaaataataaataaccgatataaaaccaaaataaaataaatatgctcttctacggtcccatccgcgccgtttttcctcccccttcaaggttatattctaatacttgaggctcccctcttctggatcttgatctctgtcagcgcatttcgtttatattatgctctgcgttcgcaacatcccggctaccaatccagcctgaccaaggatctctttctctgatttcaaggtcgtctgcgatcgcatatgcgcttacgttctttcccctccccccccctcccctttgtctattacctggctttccaagtccacgctttagctattcgcgctcttgggtctcatcatggctccaggcagtgggcgcgactttaactgctcgtgggagcattgtgcgaaggtgggtgtatctccgcgggctctactcgtcatcctctaaccggtttagtccttcaatcgcaaatccgatctctgtcgccattatcgcattcacaccaatgagcggccgtatcattgcaccgtaaaggactgcaacaagagctttattcagcgcagtgccttgaccgtacactcgaggacccacactggcgagaagcctcatgtctgtgaccatgaaggctgtcagaaggcattttcagatgtaagggcttgaatctgtatgtggcgcatttactccatttactaatttctatagtcatccagtttggcccgtcatcgccgaatccacaccggcaagcgaccatatatatgccacgagcctacctgcgaacgcaggtaagtactctgcgtggaaagtcgacagcgctattctaattgtcttgttgaaactgcagtttttgtcgcaagaccaccctcaccaaacaccaacatcgctctcaccccccggggagcttgacccgaccatcctcagaagatgcgacctccgagcactcgtaccaccaaacacccgtgccggtctcgggcccaggtgagcagtacatgctcggccagcaaccgtattacccgcaatcggcgacgccgagccatgagtattactcgccacagagtgtgccgatgggctccgtgccggttcacgaaactgcccctccgatcgtgccgcagcctgtacctggatcctcgccggtaaacatgccacacccgcaacagccacacccgcagcaccatgcgcatccgcagcaccagcaccagcagcaccagcagcaacaccaacaatatctacagatgatgcaacagcgttacgagaccagcccgcgcgccaactacctcccagaacaataccaacacccgtcttttcaaggccatcaactgccacccgaacaaccaatgatggtttcataccacccaaactatgcgtacaaacccccaggctcccgtctcttgaaccaagccgaagggactgactggggctttttgggagtaggctaagacgagactccacctagattgtggacccaatgcgtgtttaatgcccgttacgactttccctgctttctccggctgtgtctttgcttttttttgcagatcagaaatccgcatatgtttgtttctggttctggttcctatctctgctccatttctagggttcggcgctttgattatggattcccccttcgatattatgttattctttttctatatattgtcattttaaacggaggcaaaggtgttacccttctcggcgaatcatttttttttgatacctgaacatgggatgtttttttctttcttcttttttctgttctattccctacccctgcgtgtattggtcgtaagacggtcattccgatatcgcccaatgatatatcagcagcagctagttgtttcccaggaatattactgcgatggaaactgcactctgattggctccaggacttagcctttgaacagaaatcctttccacatcgtatattcacttctcttctcagcctctcatattatcctacatcctcaaactagtcctcgaactacggagtacatagttcatagagcatcatgtctgattgatcgaaataaattacatggcatgactcgtgggcttctcgattccttctgttccaaattcttttcttttttttttttttacacgcggtggccccattttcctcggaaagccaaggacagagccaagggccaagggaaattcgaggagcgcaaccctgtctcgctaacaaagacgttttttgtcgcactcgttttcgcttacccttctagaatcggtgacaattatattgattaatattcttttttaggaaggacacttcagagatctagaaaattatttccatgactctctactactgtctaactacaacatatctagtcacagtatcatgatacatttgtctgcctgcaacaacacccctgtagaatccattcggccccttcgcatccccgagatcccgaatgcaacagcaatttgttttatccctcaaacatactccgtagttacctactagatgaatcctggtggatatctcggtagggatctatctctaccagactactccaccaaagcggatacggactagttccctgctctgcatagttattgagtaaccgatttcgattcatatccaacgttgcactctgtctagaacaatatcgccactggtagcaaatcaaaatatcagtcgacagctccgtgggggtaccgggtccagaggagtccttggttaactagtgtgttagtattagtgtgttagtttagtgtacatggctctggccctggccctggccctggaaaggccttgtggcgaacaggaaaatttctctctttttttttgaacaagggtctgtttgcctttgccgcttctcgagacgagacgagaccttggtgagacacctgcgtaccagggagtttgtgtaggtttgcttgattgtatacggggttgggttgggttggaaggtacgtacaaggtacttgggattcattggcatagagatatatatacgacgcagccaatcagaatcgaggaatggaggggaaatgccaggaagtagatttaattcgaatatctggcccaaaccactgaaataaatgaattaaaagagcattcgatcggacgagtatcccacgccattgtacgtagtgccaaatatcgacatccttctattcgactatcgcctgcagcccgaaaccggttttctattgggttgtcaggctactgtaaggctctcaaactacaggcggataccatttccgatttgaaatagaatggattactacaacctctcctcctgattgtctgccgttttacctccccttttcgttttcgcggagatctctttccctgaatattcaaacggagtctccggacttttgggcctagacactgatgcagatccatacagggggggcagggggaagaggggggaacaaagccgtccgagagtggggagattaaaccccggtgaacgtgtggaatgtgaaagggccggtagatcccgcctccagaaggatcaccaatttatttccagccggaggagaataaggacacaaagacccggcctgtcgggccttttcccggcggactggatggtatgtatgtatgtacctgcgcactgttccggacgctactactctatactactctataatctatgtaggtggacgcaaaaagcctcatattacttcgagccgaggtgatctacgatttatctcgtatactagtaacaatataagtgcctccgtgggcgtttcctcgtgtttttctcgtgtttcatggggtcgcccctcccgcatgcaagtcacaaaactaactacgcaaactgggcgttgtgctagccttcaaaacggggtctggtttgactagttgtctccaataccccccaatcgtggaggcttgacggggtcccgagagttgttcatctcgcttctaccgagtaccatctgagactttaatttactgatcctagcctagctactccgtagttagtgatgtatactagtattcattttatctccctccaatcgatctaccaaatcacaaagtggcgctcccgtcctgcgatggggcccaacttcccgagtcgccatgcaataactataatatactagtattaagtaagtaaggttggactccgtgctccgtaccctgtaactccgtagaacatccgcccggcgaatgcaaatccagacttcggacgatgatcaggactggaaatggcattgggcgggcgtaccggagtttcaagttcgcttaacggggcagctactcccgtgggcgcatatacattccctggcaagactaggatctaatctaatcgcttgctggggtatattgtatgtatcaggatatggatgggctgagacggaatatgagcgatggtgattggttcaatcttgcgtgtatatggtggaagactcaaattcgatggaacatgcaatcagaaaacgaaacaggctgattcaccgaatcgagaaatcacataaggcatgatatccagcgactgcccaatccaagccaagccttttttcctcgtatcaggctactcggccttgatttttctccaggggcaggcaatagatggaggacatcatacgagcgacatcgaagcacagcagtatttttgaaacctattttgcaacaagcgcaataccggagcagagagaaataggacaagaactgcaagcctcaagggttggaagggaagagctatgcgcaactatttccgcttgtgggttgatcggctatggactcatttcctgattacaatctaatagttatagttggtataggagagtaaataagtactccgtactccgtaataagctccgctgtgagatccctagggtcggtcctaagagtcggtgtgggggtattctctaacggcgatctaagggggattaggaggatggacccacccaagctggactgccgtgtgaatattcagagctcgatacataatagttcgctagaactaggaataggatgtgtagttatcatggatatccttatgttgtatattgtatatggtgtatggctactgaggttctggataggaaaatagaagacgacacagaatgttaactatatagctagtgtcggagttaggacataggctatttcctattccgcactccggagtactccgtaaagcaaaagtaattaattagtaggcgccgttgcacggagtctggcttgccggtgttgacgcggggtggagacgtcagcttttaacttctttcctaaaggggtatgtagtgtgtaagaacccctggtcgggtatttatctgaatcggggttatttctaacctatcgaaaggaagtatgtaaatgatatacgtacttgcattctataatatactgtatactctatacggtaactacaatatatactatatactgtatactcactatgtatgtgtatccaaagtcaggagcttgggccttcgggagcaccggggtacacggcacagaacctggtaggtgcgggtatggtattgtcacaacgcttgacattgcggacgctatggaccgttcccgaaggtccactggaccccggtactggtgtattggaacggtaatccagtatattatcgtactgaataatcgaccgaaccacattggcccaaaagcaaacaggaaagaaacacttggcaaatccacaatgtaacctgtcgaagacaattcgaaactcacctcttagccggtgagtttctggttccatgtggtccccgacaagacctgcaccgtctacatcgggcatggtaagaaaagaggagtccaaggagaagtggagtatccagttcgattccattatacataatgtgagaatccccaactcatgacatattccgtctggagtcagactagcctgatccatgagacctcagaaacaagctttgtggaatggggtagaggacgcgttcatctcagatcggggtctatccaatgagttggacgcgaggtcgtttccgaatcgaggtgatgtccaggtacaatgaagccgtgggtcggaccttgaaatggtaagttggatacgagcgatcgacggatttcagtccgttcgggtatttttgcggctcaggccgatctcaaagttcgaatttggttttggaaacgacaatacaccgaaaaaaacaccgaaaaaacaaatacaattgaaattaccgctcggctagaaagtttcgacattctaaaattatatcttctggaaaggagttcgatgaaccagagttcgtattcaaggtatgtttggtctagattgcgcgggatccatagatcagcatcttaaagtgaagctatgtgtgccgaggagatacaacatagacattctgttacatcagatcaacccactctatctggttcttccaccctaaggcgtgctaaccagatctgcttccagatcggatcctcgttttatacggtttctatcgtgacacgaagtcgtcttagtacgagtagtacatgtccgtcaatcaagtccgaatacaaacaaatcatcacctcagcaataaaatacaggacgccatagttaactaactagccatcccgcaattctcacagatgccccaggcactcagcctaaccgcatctggaaactttagacgagaataccggcgcctatcacagtgcctggggaagtgtgtatccgtatcatgtccatatccatatccacctgggcgtacaataacttactcctatcccgtacagttgataataatatagttgatcttagtgtacgacgctggtaacggctgcgtttataagccttttttcgtgcgacgtcatccgggctggataaagatgttgtaccatgtagaccaggttcctatctaggaatagctatcctggcacagatacaagatgataccagtcttgcattcccgaggtaaaggctgatcggaggtttttggaaatgggggctgatgtggcttggctggggaaattgggtagctagttaaggctctcagtagtcagaatgtcagagtcagaatgtcgcgagcacatggtgaatggctttttgaccgaggctggctgggaggagattgggccgttgcgatgttgaccacccctcctcggcttgaacatgagcagatacagtagttacgtgatatcggtacttgcgtggtacatgcaatggcgacctcgtgttccgttatgttaggtatggttattcgaaaaaagacaagacgcagtctgaaatatgtgcatgaatactctaatgtagcttctctaagcctttctataaacccccttccagctaccagccgagctagcaagttggtgttgacacaaaaggtgaaagtaaaaggcctactcatccgcaacggcaacctcagcatcccacttcggcgcgcccatcagacgagcacgcttaacaacacgctcaataccatcaagaccccgcttcaacacatccatcttaggcccgtagctcagtcgaacgaagtggtgacacgggctgtcgaagagatcacgacgcttggccgggttcaagtcgaagaagataccaggcacaacgatgaccttctgggtcagcagcgcactgaagaagttcagaccgtcggagatgttagcctcctcaggcagagggggttcgatggaagtcagatcgagccagacgtagaaggtcgcgccggggacgtcctggacacggaaaccgatatcgtacagacggcccaggacgtaatcgcgcttctccataaagtgctgctgcagcgccttcatctccgtgcgcaccagccacggctccagcatcgggatcgcggcttcttggaatggcacgttggcaccaccgtcgaggtacgatcctgcggaacctagggcgtcgacaaaatccttgggtccgaccacccacgcaattcgccagccaggaaggcggaaccgctttgtgagcccatcgatcaggagaacgtctgtgggtccggttagcccatgatcaaaaattaggttttcggcgcgggtatcgtaccatccttgttaacgtcgacaacgttcgatgcaccactgattgttgttccgtcgcagcccgttgtgtagttgtatccgccgtagaactcgtccagaatcagagtcgcgcggtcacggcagaggtcctgaatttgttgcagctcgtcttgcggcatgaagtggcctgtggggttacggggattggaggtcagcagcacctgggtaccacgggcgatttcctcggcgatcttgttggggtggatgtggtagtggtcctccttggaaagaggaagggggatgggcgcaatctgcagggaatcagtaaacggcaacatttcgggctcagctcttctaacgcacgttcttgaacagagacaacatctccgagtacgcagagtaatcggggatggggaaggacagatacgagtttccgagaatggcagcaatgcgaatcagacccgcgcggccacctgggacaatgcagacattctcccaggtatactgactctccttgccctggcggtagtggtcgttgtacagacgagcgacggccgcgcgtaatggcttgataccggcggtcgggccatattcccgggaagcggatgtgatgggaatagcagttgggcgagggaaacttccctcgatgccgtcgtcagcctcgggggctccctgacctagattagcccagctggaaggatcatcggcgtagccatgctcgcaggctcgctctgtgcaccagacgacaccggtggaggcacgggaagcgtcgagaccggcgtggggacggtgaccctcgtgagcctctcgaaattgccgatgggtttctgagttgagttctgagggtttccaaagttagaaagctagaaatgtcagaaacgtgtcattgcataccgttatccgacagttccttcttggccgagggattgcggttctcggacgggcgtaggatgctcaggcggcggccggagaacgacattcttgcgagtgttctggtttgattataaaaatgattacagcgcctttcttataagaaaaatagggaactctcggaagtgggaggggcaaaagtgaagaaaaaagtcatctgcagcgagccgggtctcttttatagaaggacgcaaaggccgcttgccaacacatactaggacgagcacaccgactcgactcctattcataattccctcaatcctcaggggcaacaggcgctccgcgcatatattaatagcgcagaccaatacggtgtgatcttgagatatttcctatttagtcttttagtgggcgatcttccgaatagtagccgggagtgccggaactacgtttcgggtatcatattcagctgctactataaatatagctattcccatacagagctatagcacagagctatagctactccgtatacatcgtagctgtacggagtagactaacctggccttgccaagaatatcggctatccgacctgctccggcatcccgatctgataggcatcccgatacggattataggtctggtatagattccaccggaaatataaaaaaataggcatatacatcatatggaagcttcgtacgttcgtggacattgagatactagtagatcagtaaagagataacaatccgcgaaatgggaacgcaaaatcagaataaaaaaagaaacgggacgtctttatcccttcacctcgtcaccaggacatcattcatgccgtaaacaaatcattagatgctcgcctggagacgccacagtccaactacatgtttgccacggcgtggctcgctgaaagtcacaaagaagaaggggagatagaaagaagtatctcccccgagaacggctgctcaacagtttcaggccaaatccagttgggtaataagggtcaggatgggagaacgagcgccacaggcgatgcaaagcattgaaacgacgaggatcaatcctcgccggggggaatcaagggagggtattaagtcaagaatgagcggaaagcaaacaagaaaacgaaggatctaatcgaccacctggcagtagagttgaatctctcccaccaagcccttggcgagcatatcacgatgttgttcccgccattccaggaaagcgagctggaccgcctcgtcgctatcgatcgtgacgaaatcaccgtcttcatcccggtagcgcagccggacacttttgctcccgatggatcgatcagtgaaccgagcgagtttggcatccacgcggtccgtcaatgaccggaacataatgttggtcgcaattaccagcgtgacatagttgtcctcaaaattcaccttggccttgagttgagtgggcatgtagtctccttcctctggctcttgggtcaggggcgatgtggcaggatccgagatttgcccagaattgcgggtatcattatattccggctcgttaaagtgcgtcgtgtggagttggggctgggtacgaatggggagctgggtgttggtgggcgaaccgttctggctgcggttgacgggggttatcatgttggccatgtgcgcagggatcgggggcacggggacattgtcgacggtctgcatagtgtgcactcccatataacgccgtgactccggattgttactgtgatgatgaatatcagggctactagccgatcgcattcgctgggccatgccatttgcgtgagactgcgaggctgagagtggaggcaatgacggacgctgagcacctcttggaataggttgaggtgggaaatatccgccagaggttgttccgtcccgcgatgttacacgagacaacgctggtgctgtgtagcgaagggtatcctcattccagaccgatgattgagtggtggaattggtattctgacgactgaaggagaaccctgcggattgagaactcgatcttgtggaaggagtctcagtcgtgggggaaaagtaggagcttacgtttcgatcaccgggggacatgcttccgctcccggggaactgagtgtgcagcgcaatcgttggatcggttcccgcatagcgcggtcgggtattggggtgagcagcagagatggagctgccattggtggcagatcggtttctcagactagtactggacggatttcggctcatggggaattcggattgatatggatctttgttgctggcatcatcggtatcatactcttgttgataggggttgggaatgtgcggcatgccctccatgtacgtgaactcgctgtcggatgtaccagtattgcgcatagtgcgtcgctccgcttgaatcacccgttgggtgtcaatgtccttgtaccaagtccgcatggtgttctcgttaatatatcggatgataaaattgtcaacgacaccagggtctcctttccagaaaatctgaatacgatagagtcctgtgtgaaccgattagaggtatttttcttaacttaagaagccaagagtgatccttaccaggcttttgaagacaaacaatatctgtgacgttggccatgtagattcgacctttcagttgaagacgagcctttcctttcgcattcaaagacggcttatctttttgcatcataagcttagacttttgcttgttgggattgatatctttgcaacagagaagtattcgctcgaagagatagatatggtactaaaagccatgttagtgacgtgccatttcgggaaacaaaccataggatcagacagtacctctctttcgctatccttaccactgtctcccttgacaacttggaaggtaccaaatcgaagaagatctccgaatgactccattttcaatgctttccagtcatccacgcgctcggataaatcaagtaccgccgcagtcaaatgttctttgtggattgcctcgttagcaaagtccaacacagtctggatgcaattgactgcacgcgtgatatcggcctgcagttgctcgtcttctaattgtttgcgtagctcctgaaaaggtacagctatattagctcgttggtcttggacctagcattcagcaaacttaccaaaagcatcagcgggtatcgagtcaaacgctggaagggtttcacaaagaatccattgagcgttttcggctgagcgaccatttgctgcagatctatatggcgtggcgcactttggattttgtcccagtccttcatacaagcttcatcacaacgcatctggttggcaatgaaaggctcatactgccggaaagcatcttcatgcaggaagaaaaggtgaccccagttctgcatttcttctggcagggcgtagtgctgctccatgcgaatcaggaatcgttgggcaaagtctagtaggttgtttaaattgaggaaaatctgatggctcgcatcacctgtcaaagcacctgtctcttccagttccttcttgagcgcttggagattctgcaggtgatgaacataatcacgctccgtctccaaaagttccttgaggatatgctctcgcttggtaagcttcacattggttttcgcgctgggagcctctagaacttcggattgctttagttgaccttgcatctcgagtatgtctaccacgcggttgaccattttgatcactttgatgaatccagtggtactctcgccgtaaaggtcggtgatcaaaaagcaatcctgctgagggaatgccagctcttgtaaacaggcctgtaggaacttgaatgtcgccgctttgggacgcttcgcctcagttaccttcccagtatcaatttccagcggctcgtcgggaccagatgcattatagatgctcaatagtggatagccatttctgagacaattccacaaggaagccaccggatctgtatttcctcttatgcgatcatcatcatccatctcttgcaagtatgactcaaaattgggaacttcggatagccgtcgcctcagattgacacagctctggtagatcgattcgccaccacggcggttgatgatgttatcctcggcgaccggagcgccgctcatggctgaagagtcaatcatatctttcctcgggggccagatatagatgagttagaccagccaggctcaacttaaatctgcacagcagacccaagagggataggttcggaaggatcgacgggcgtcggaagtggagagatgacgatcatgagttccccgggggcgtaagctgcgcggcgcagggggtgtcaaacgagagtttcgaaattccgacagcgatccgatcagttgtcgtaggtgtgatttttgaaatatacagatcccgggaagcgctctcgagatcagagatacctatatatttgttcgaaccaatagcgcgaatatcaagtacgatgcaccgtaacttgaaaaggaggggctcgaggagtataatccgaccttcagccagccccaatcgatggggtttggggattcgagtgtttaaaggaccgctgcagccgggcaggcgagtcagatcaggtaaaagagaatttggaggaacacctttgcgaaagggccagtcactaggacacgacggaggacaatcgaagtcccgagaaaaagggggcgcacggaataataggataagagaagccagaacaagaagggctcggtagttagatgaagtcaataaccagaacgacaggagcaagcacaacagctgagagttctgctgatggaacagaggaatagggatccttggggccgaaggagtctggtcagtttcctcaaaaggtttagcgtgtgttttatggggcggtgtggtgtggagaggggcagctgtgtcagcagccctccacctcccaaggttgggggtcagggctgggcagcctaggccctgggacaaggctgggaactggagggctggtgatttggagctggagagagctagggctggagaagagagctaagtgatgctggagtagttatgtacattcgtaccttttgtagggggcttgcatacaaaaggtacattcactgagatatatacttacacctgcactattacaacctttctgccctcaaacgttagtatcccctgtctttagcgcctaggaatggtccgtgcaattataagacagttctgattttgtcggttccctttgtgacatagcactatggagtatataatgagtgacctagttagtattttggaaaatgcaatcggtactatctttttctctctcacctagacatggggtttctctttaatcatagccatggcatgaatggaatatgctatatatactacgagttgttccccaacatatttctacagtaatagttacaacactacataagacattgaggaagcggctcattatggacctcctcgctcttatctgacacattgatcttctacaacgcttgcttttctcatgaaggagttagatacatgtagtcatgtaggttttgctataattctatgagaaatcctacggacacacccccgctagctacttcaggtatctccaccgctggccacaattatcaataatatatatccctacagtattctgaacacccgcgccatgacaccattgaagtacctttctatacctatttagagatcacctgatctacactataagataatctagattaacaagaatactagcagtctttatatgtcttttcataggcataaaaaagtacttcaatggtgcggtcgggttatagtgatctacacaacatggtggacaattgcggccggcggcggatatacccgaagtagctagcggggagttctatactcgaatcacgtgactcacgggggcaacaactataggctcttgaggatgactctgtatttagatatagactctactgaaattctacttttcttctgtctcgaatttaaatggaatatcttccttctattcagtttgcgactgaagtacgtgagataattgcgctctatcaatcaatctccagggctggtgggccttgcctcgtccaaacctgacgtgacatgcaccgaggccaacccatctgctcaacctccttctccttcctttccccacaaccttcatcttgcaaaggaccttacctcatttattaattttctataatctcttcacggaaagttccttgcaggatttcacagccatcgcgcgacgccattgatttcggcgttccattcatcagcccggcgcagacccctctgaaacccgcatcaatggagggcgagcccttgcccgatgctcccgatgccgccgatgctcgaatctcccctacactgcaattgcagacgactactgtttccgagttccccgcgctttctttgtcaccctcgtttaagctagatgaaggctactcggatgatactcgaagccaggccgacaaagacctgggatcggacaatgttatggcgcttccaagttggttgctcgcccagtccgagaccggtagagctggtaagattaccctattccccttgccccctgtggtaattgccacgagcgcgaagcatcagcctcttgctcgtcactttgcgattatccttgctaactgagggttcacgactcccagaactcgcatacagccttcttcggtctttaccaacttcgagcatcgcggcagtagttgatcgactcaacccaatcttccatattgacccatgtgtcaggcttcccccggaagtcacatggcaggtttttacctacctcgacgcccggacgcttctgaatgcttcgcttgcatcccgctcatggcgtgaacgtatccttgactcaggtctgtggaaattcaaatacatccacgaaggttggggcatggacacgggcgcaattcgtgcgtttgaacaagaacattccgaggccatgtcgccccagactcggaagtctcgcctacgacactcggaaccagatctcggggaacctaagcataaaaagcgcgtgccgtcgacctggctcaattcccgaagcgatgaaaaccaaaaaccgaccgtgtttggccctgcactcccggtggccgacagtgaaggtgatcaccacatgactgatgatgacgatcagactacaccttcgttcgccgacgacccggagttgattatgccaaccagtacctcccaatctttttcgccactgtacccacctctacgatcgcatcttctcattcgggataccgacggaagcgccaaggtcaactattttcatatctacaagcaacgcaggcggctcgaagcaaattggcatcaaggccgatacactaatttccaacttcctgacccgtctcacccagaggaggcccaccgggaatgcgtatatgcgatccagtttgaaggccgatggctagtcagtggcagccgagacaagactctacgagtctggaacctggataccaaacgactatggcatcccccgctggtgggacatataaagtccgtactttgtctgcaatttgatcctcgacccgaggaagacatcatcatctctggcagcagcgacaagtctgtcattatatggaaattctccaccggagaaaagattcatcaaatcgaagacgcgcatcttgattcggtgctcaatctcaaattcgaccatcgttaccttgtaacatgttctaaggaccgaactgtgaaggtatggaaccgccgagctcttttaccgaatagcaaggattatccgcatatctgccatggatcaggcgccacatatcctacatggataatagatttgaacacgattccaccgagtgttctcgaagctggcattgcgcatgatcaatacaaagtcctagagccttacacgttgcttatgaccgtggaaggacatggagccgccgtgaatgcaatgcagatccatggtgatgatattgtgacggcgtctggagaccgtgttatcaaggtctggaacatccggactggtgcttgctccaagtccttgctgggccatgagaaaggcatcgcatgtgttgaattcgacagccgaaggatcatcagtggcagcaatgataactctgttcgcatctacgatcatgccaccggagccgaggtggcgtgtctgcgagcccatagtaatctcgtccgcacccttcaagcagggttcggtgatgctccgggagccgatgaaaccttgcgtgaagaagcgatagcgtgtgaaactgcgtttttcgccgctcaagaggccggattggacgtcgacatgggtcatcgggagcaacgccgcaatggttaccaaccgaacacggcgggatcgcgggaccctcgtgatatccctgctctgggggcaaaaattccacccggtgggggaggtagtagctgggcccgtatcgtgtccggttcctacgacgagtcaatcttaatttggcacaaagaccgtaataacaagtggacaacggatcatcaactgcgacacagtgatgccatcgccaattccgctcgtgcgaaccttagccaagtggcaagaaacactgttgcggcccaggcccaggctcagcaattgcaagcagcacaggctctagcgacacttgggcaaaatcccaatatcaacccccacgctggtcgtgccaacccacaatttctgcctcctctggttatcaatgccttgccactcgctccacttcctgctcaccatcatcaccaccatggccatcaacgcagacctcaagggtcctcgacagctgcgagggtgttcaaactccagtttgacgcacggaagctcatttgtgccagcgtggaccctcgcattgtgggatgggattttgcctgtgatgatcaagatatcattgaggcgagtccattctttaaagggctttaatctttccttcgcctttacgctttttaatactagcacctgttcttcttttacttcagtgcatctcctgcatcgtcctcactgggcgcgaattgtgagccttccaatgaacagacggctcaattcacttgacgatttcctattattagcatccatgcgatcgcggtgtgctttctttgcctggtgcattactccttgctctcccgcttcctctgtctctctccgtgtcctcttgtcctctccttacccatcttctcaatgtcgtgtcatatacatacgatgggcccttgctttccgtttaatggtgcatttcttatcttgacttccatattaggagtcatttctggctatccaggtcacatattctttccagagtttttttttatatctcttcgatctcattattatctttcttgcatggcgccggtgtggcattctatccatagcattatgattagcatcaatcagaaaccttcgactaccaagtcaatatcattttatggatatcaagccacggcatactcgcctcggtttcaattggaagtaggccctgacaggtgctgttttatagtactgcggcaccaagtgctgcagcactcccgcagcactacagtaccgaaccaagattactcaggtagggcggtcaaccgatcgcgtacccaatcctccggcagaaaacggaactctcttacgtaagcaacaaaagtggggccgagagatcgacgccacgacccgctccccacttggcttctatcaattctatgcaatacaccgttccaaatacacctttccaaaatggcaaagagaaatcgatcagcttcaccttccaacacgccacatgcccaacgagctatacgtcgattagcaagagtatccccgcccacagcaccccgcggactgtcaacactccctacagactcactgaccagcttggagaaaggcgcccgggagcacgtcgatacagttgccttcaaccctcgatcaaccggaaaggcgtgacccttcattcggcgcacagttccaactgcgggacaactatcgctgtgtgataacgggtcaactgagcaccgatcaatgggagcacgaaggggaaccagtggtcacatgctctatatatggtgggctatatattggtgggacccagcagaagtaacttacctttgtaaactccccattacaatctgcctctacttttttcttcttcataatagcaactatttttctcgtcgttctcttcctcggcaaaatgccatctggggattcagctgtaagtgttgatatctccaatacctctctgtcagacttctattataaccatcatcctcattaataatttgttgggacgtttactgatagataaagaggcccccattctgcgatttctgtcgccggcgtggcgatgatgaatgcgacttctattacgtcgcgcgtaagacccatatactcatatcttaaatagaggggagatgttaattttaggtgacgaagcagactaaagtcccaaaccccgtaagctacgctacggctcccgctcgaaagaggccaagaagggcatgtcgtgttattttattatatcgagctacccagtctatgatacctcgcacttgcctcttacttgcctaaggggcctcatataacaccttttgcgtttatctcttggccaggcgtatccggagctccaagagatacatcaagcccctggatctaactgtatatgtatttccctgcgccacaaaaaatactgtcagcgaaggagattaatactcttcgcaacgggatcactcttcgagactcggtacatacccagcttggcaaatttacaattgccttgaagcctaccgtaagcaggcaatgatctactatgaaaccatttatactcactcttcttattaggacatgggaaatgagtacgaggtaaagacttgcaagtgctatcccgggctgatatcccaccattcccccgatcggcgcgtccgatttttaccaaacacagagtataagattccaagccccgcaattctcgatgcgcattggagagtgtgcgagatcttcaatgcatctgcgatgggagagaccattgaacgacgtcttcgggagtgggaagggttgagaggctctaaatgcgctattattagagaggacggtacgaccgatctcgctagtctgctggatatcgcgctatggggccaagtttccacatgaatacacgctttacacttctgtattagtatttggttaggtctgagccaatcttaggtttatgaagccaccttcaattaccatgttcaccactcttcatgtgagaataccggtgatcgatcaaagaaaggcaaggcacatctcgagcccactttcgatattggatctgtacaccattcaggagtagagaagcatacaaaattctaatcagggacgtactcaaatttactctgaaatcaaaaagcggcaagaggtgagcacttaaatagaaggggaaaggtctcgagtgccaggcattgtctggtacattccattgtagcaccagatgcaagatatgaaaatgcatttacaatgacatggcaagggtgcaaggagataaataaaaacatcaaaaggtagatacctgcacctcgttagacttactgatcatagtatatgtaaccgaaaaagaaaagaaaagaaggggttaggagccttagactgcaggaaaaagaggggaagatacgtgcctaggtagcttaggaagactagcagggatatcagtaaattagtaaattcctaccttttctgcatgcaatttcctgttttattttccctcttcattctgtatccgacttctaatattcgcaatgtcaagcgagaagttcaccgttactgagcatcttgtcccgggcagttatattagagaatacccagggagcaccgtcacgcaggaagatgtactgaaaattcatgtcaaacaatatacccccaaacacgaaggtcccgtcccagctgatgcaattactttcattgccgctcatggagtcggtctcccgaaggtgaccctgtctttaacctgataattcgtctcatgtgctcaacattggacacaggaactgtacgagccgctgtgggacgagctgctggaacgaactaatggcttccacattcatggcatctgggtggccgacgtcgccagtatgaaccagagcgggatccagaatgaggataagctcagtatggattgtatgtgcttcccattcgattcttgatacatctccccccatattaacaatttcctaggttcttggatggatcacccgcgagacctcttcttgatgatcaaccattttcgtgagcagatgccacgtcctctcgtcggagttggccacagttttggcgggaatatcatgtttgtgacgaataaccctctcaattttgagaattcaaagaatgagatactgatttctttttccagcacaaatcttgcctatctacatccacgcctgtttacaaccctcctccttatcgaccccctcattcagctaagccctccctcgatgggcttcggcaccgaccctccaggcccgatcaactacactctctggcgaaatgacgtctggcccagtcgcgaggcagccatacgtgccaaccgtggcctcatccacggctgggatcctcggtgcgtagatcgtatggcgaaatacttctttcgcgatctaccgacaccgctgtatccggatgtcgaggccgtgaaggcgcgctttgatgcagccgctgatactactgccactccggtcaccctagcgacgccgaagtaccacgagcttatagcgcaaatacggcagaacttcaatgcccgggacccgaccacgggccggatcgaaatcccacgagccacccatgccgatatggacccattggtggcatctattcccttataccgaccagaacctcgaagtacgttccgccgcttagggacactccggccttcatgcctgtggattgtgggcggggcgacgtttttgaatgtcgatgagattcatgaaggtgtcaagatatgcgggtcaggcatcggcgggagtggaggtgtgtctgagggaagagtgaaagaggttatcttacctggattggggcatttgatgccatttcaggagattgggactgttgtagggccatgtgtggcctggttacagcaggagatggatcgattccggcagatggagagggagtggggagaagagaggaaaggcaagagtcatctagtgctagagaagaactggtataaagtcttgaaaccaatgcctagtggacgtggcaagggtgggagaaaggaaaagttgtagatactagatggtcaaatgtctactttttcaattttatgttatcgagatatcctcgtaaaacccaacaacccttgattatccgtctacatctccacagatcgccttacattagcaatcaagtgaggtctagtgcacacgattgatatgtcgctggatgtatgccaaggccagggtggtcctggagaaacccagcagacgacatggcgagatcgacatccttacaataaccccgcttcccacaccgtttgaattatatctctcattctaaccagaagtttcacatcagctctttcatataccgtccgtttaccgtatgtaactttatatgtatgttgtagatcccaaacaaaacgtacattttcattggtccgtagcaagggtaccgaaatgggggaggttacccgacatatgcatgcaggtgacgttttgattctaaaacatttgtaatattgaatagttgaataatagttgaataatagttggataatagttttatatcctttacatgtatttttacccaaagatacctcggatcggatttcaacgttccgtccgacccaaattcgacggaaatttactagaacaggattggggcgggtgacctagcaccagtcacccgccttacaccgtattaccgccccaatatttacatgtacatacaacatacatggcccactacatggcccactacatggcccacttggatggaaatttcatacatacacgctaaaaagagcagagataaaaatcttttaatttaaacctcagtcgtattgtcaaaactagagaaacttgaaaagtactaggcatcatggcagtaacaacgaggcagaccaaaaacatccatggacagcccccaggttccacctagcgtcgactatacatcgaaagaccccgatttccgtttaggatggcatgtgagaggctttggtgtcgccagccacggctacaaatataataggtcatcttccaattttaacatgatattgtgtacacctttctcccatattctctgagttgaaatcgttcatcaaaagcaccatgctcaccaagtctgtgacctccatcctccaagggattaccttggcagccaaagaatttgagaacaatgaagctggtgcaagagaatccctcattgctcatagtagagctctcatatccgcccttgaagttccgagcgagtttattcaacacactttctggtctcaggtaagcctgatttggcggggtaagactcgaaactattgctgatgttcatatagccagcactgtctgctattatcaggcttgctgctgatgtcaatatgtttcaacacttgaaagatgccgcgggtaaggggatagattgtgaagctctgtctatgaagacgggcgttgatgccagccttctatcgcgcttggccagacatctcgtggctatgaatgtgattacgtttcaaaatggagcattccatggcacagacctgagcgatagccttgccgccgagaactatcaacactccatccgcttttgtcatgatgtgtccaggccctcgttcaatgaattcccggaattcttcaagagcaatgggtacaagaccccgacgctgagtggaactgatggtccattccaagctgctcataagactgagctcacctttctgcaatggcttgtcaacacacacccctatctgcagtattttcactcttacatgagtgtttaccgtgctggaaaacaaaactggtgcgacaccggtttctaccctgtctcagagcgtctcctttccggattcgatgcctctgtcagcgatgttgtgctggttgatgtgggcggtggtcgggggcacgacctcgagacttttgcctctaaattcagtcctcttccaggaaggctcgtgcttcaggatcgagaacaaaccattgctagcatgccggccgatgaatcccgccaatttgaagcgacggctcataacatcttcacaccgcagccggtcaaatacgctcgggcgtactacatgcactctgttccccatggcttcggagacgaggatgcaatcaagattatggcaaacctagtgcctgcgctggcgaagggacactcccgagttcttttgaatgagattgtcgtcagcgaggagaaccccattctagcggcaactaatatggatatgattatgctggcccacttggcagtgaaggagagaacagaagctgaatggagatatatcttcacccaggcgggattaaaggtggtcaatatatattcgtatccaggcgtggcggagagcttgattgaagcagagctcgcctaaacgtcaccaatttctataggttggctacatatcgaggaaatcagaatcagactcggaaacaatataggaaataaaaacccgaatcccgaatcggcaaatctaggcttcagcctcggaaggttagcgcatttaaattttcggttctgtggggccggcggccgcagccctactccctacggtatcccaagtttaaacctgtaacaaaaacgcgttgtttacggagaagtccgaactccgtaggtaaaaatccttctgagggattaaaccggtcattgtgggggtgtagatcatcaaaagaaagaaaacgaaaggcttttcgctaaaattcccctgccggagtcctctttgattggactacagtgtagtgctgcgatgaaagagggagagagttgtatttccagttcttgtatttcctgaagttggtgcctgccgcaccggactgatggtcaggtgacctccacatccaacaatcttaaaaggccgtccctcccctgcccctctgacttcctttgggaatcacccccccattcccattacctattagttttttttctattttttttttttttaaaatcagcatcatggtcgaaattctggattataccaaggctttagaagtactcaaggagtatcctggagatggcctccacgtcgatactctcctcgattcggatagtcatggagctttgacttacaatgacttcctgattttgcccggttctatcagtaaggcaatgaacattatctcataggtcgttctctctaatcgtacgaacagccttcccggcatcggatgtttcgttggaaaccagagtaacccggcggttcaccatcaaggcccctctactgtcttctcccatggacactgtgaccgaacacagcatggccatccatatggctctcctggggggtctgggtgttatccacaataactgcccacctgacgagcaggctgagatggtgaggaaggtgaaacgctatgagaatggcttcatccaggaccctatcgttctgtctccggagacgacagttggagaagcaaaggaattgaagactaaatggggattcggcgggttcccagtgactggttagttggatttctccttggtggctctttttctttttgtttcgtttggtgatccttaccttgtttcgttcatagaaaagggaaccctccactcgaagcttctcggaatcgtcaccagccgagatatccagttccacaagaaccacgaggatccagtcacggctgtcatggcgacagacctcgtcaccgcaccggcaggcactactctcgccgaagccaacgaagtcctccggagttcgaagaagggtaaactgccaattgtggataaggatggatccctgatctccctgctctcccggagtgacttgatgaagaacattcattaccctcttgcatcaaagcttccatccaagcagctgctctgcgccgcggccattagcactcacgacgcggataaggtccgtctccagaagctcgtcgatgccggtctggacattgtcgtcgtggatagtagccagggccacagcactttccaaattgctatgatcaaatatatcaagcagaacttccccgacattgacgttatcggcggtaatattgttacccgtgagcaagccgcggcattgatcgctgctggtgcagacggtcttcgtatcggcatgggcagtggctctgcgtgtatcacgcaggaagtcatggccgctggtcgtcctcaggctgcagccgtacgcagtgtatctgccttcgccgcgcgtttcggtgttcccactattgctgacggtggtgtccagaacctgggccacatcgtcaagggacttgccttgggtgcctcggcagttatgatgggaagtctgcttgctggcactaccgagtctcctggtgagtactttatgagcagtgaaggccagttggtcaaggctttccgtggtatgggcagtattgcggtcatggaggacaaaagcaagagcggcgctgggaacaacgccggtgcttctcggtacttctctgagaatgataaggtcaaggttgcgcagggtgttgcgggctccgttattgatcgtggctctatcacccagtatgtcccttaccttgttgctggtgtgcagcattctctccaggatattggtgtccagaaccttgatgccttgcgtgaaggggtgaacaatggaacagttcgctttgagatgagaagcgctagcgcgcagaccgagggtaatgtccacggcttgcacacccacgagaagaagttgtactcttcttgaatgcggcgtctctgttttcgtcgactgttgtctagagttccttccatctagtacaccagaccaaaagttagtcaatacactctttttgataatctgccataagcaaattgttgtcaagcattttgaaaagcctggaatagaaatctagtgattatacaagatttaaggggtacagagagctcttgaagcatattttttcaaagagtaaggtttatgaaattcaaaattcaaacacatctctacttggtcccttccatagcgtcttcaagatctttgtaaaacagccacttcgtctgcttgccgtacccttttgccttccaatcattgatagtcaaaggataaaagtccatattccctttcaaggtactatcatgagcaagaatcagaaatacattgtcgtatgcatcgagctctttgatattgtcgactgtcttcagcgccgcgtcgtaatcagaaggaagcacaggcgacaaggtgaaaacggattctgattcagacgaaagcggaatgtgacgagagtgagatggacaaggaagatatttggaaggccgaagaacaccggcatggtggcaggaatctccacccatgaatacgaatgagtccggcgaggtggtaacccgcgcgagggcgcctatatgaccaatggaatggcctgcggcatttagaagatagaaggatccgtcaccgaaatagtccagcgcgtcgaacgagcctatcttgatggcttccttttctgtcctttcgaaggagatttcccgcactttccgaccttggatgtccgaattgagattgatcgcgtccgggttagttgggaacccgggccagtggctgtcccggatgccaggaccgacgacgagctcggtagacagtgggaaagtggacgggtcgccgatatggtcaaaatgggcatgcgaccagataatggcttcgatgtctgtgctgcggatgcctagggacgatgcgtcagagtccagaatatccgagatgttgcgcgggttctggatggttgtctgtgatttgatcatggctacaacggatggcggaagtctttcccagtcctgtcgaactcccaagtcaaatagaacatggcgagtgccgactgagattaagaagcagtaagttggcgctgtcacctttctaaggcctggcagttcgggttgccagaatagatcaggtcgtaggtcaaggagtgttcctctgcgattattaggtcaattggttcccatggatacgacgaggtagggccttacgggtcgatcactcgcacatcgacggtcgatgatgaaggaggaatattcaagacaggtggaagagtgggcttgtctttgttactggaacctctctccattttcgcccgcttgcgaatcactgcttgtagtcccgtctgcttgaagaaccaagcattctcggttttgtagttctccgggttgacgatttgtatctggcacggaacaaattaggaagagcacatacctgaattgaagcaaagtactcacatcgtagttcaaaagcagtaccggaattaatttcttgatctcaaggatggcgatattcttccccagacaagtacgacggcccgctccaaactaaatctcaagattagtaagagtatgtctgacgtagacgaagtctagacccacagtcaacaagctattctccagcctcttacggtcttcatggctcagacctagccatctctcgggtctccattcgtccgcatcattaccaaaggtttctttatcccggttggccatatatgggctgattccgacaatggtccctgctggaagatatgtctcgcaaacagtcaaaccaccgccaggaacaactcgctcaaaaggtagacaaaatggaggatgcagccgtaaagcctccagaacgcacgcgtcgaggtacggcaaatctctcactttctcccacgagggacatgtacgagaaagaccattactgctctcagattccaggagctcatcttgcagacggctcagcgtgtcccgatgaactaagagattatacataattgtacgcatgacatttgcagtcgagtctgagccagccatgatattagagaaagtccaggctcttggggccctggatatgagttagccggatataaggcaagagatagaaatcgatcagcgggaagatttctttaccaaggcataacatcagggtttgaggcctgtatattgagaaactgggagagcatatccttctcgtctgaaacctcgtctttttcacgaggcgccaagcgctgcaatataaacttgtcgactacctttaacaccccaaaccctgtcggtgacctgaacaatgctataaacgggttcgtattacagaactcgtcaaaccacggaatttggcccatctgagaaagtcatacgcattagaaaccaacggtagcacgacgtgcacagagctagaacccaccacagaaactctcttcataaacttccaaatctcgcccaagattccattcatatcgcggccttgttcgaggaatccatatcgtcgagagaacgtcaatgtccccatcgaatcaaacgcaaaatactggagccagctccccagatcaaacggaacatcgttgctgcctaggaaccgaccatcgagctgttccaacagtaccgcgagggtttgatcgacaaatgactcgagcttcaccacatttgtcatggaatatagaggagcaattgggcttcgaagccttttatgaaggtcctcgtcttgggaattgaacaccgccggcatggcgcccttgtttggcgtgtagggcttctgtgtgcgataaaagtcgctctgggggtagcgatgttagcgattgaaatccaatcatgactgcacgcaataactctggtactaccatcactgaccttgggaaacccaggcctactagggtagatagccgggatggtgcgaggatccgagatagagaccatgtttggaccgaatcgaacggcaggcccatacacagcatgcatccgacggtggtattcatgagctcgtccggactttacccaccacacgcgttgcaggtttgtgaactttgcaaacaacggacctggtacatcttgcagatgcaagtatagacaacaaacgtagcgggtgagatatagcacaacagcaacagctgtgatacgtattatgatcagatagtccatagtatataagtttatgtcttgtacgtatacttgtgctggaggattgagaatgaaaatgaaatagactttcaagattgagatcaatcgtctagtatctattaaccgaatcatattgctattgatagaacaacaagctattggcctaaagggacagagtacatttgcacacacctcgcctctttacacagctggattgagttcgtatcaatacagtttatggaaattagatatttcgtaatctataggcagttgcctaatttgtgccttagtgcatctccacctccaaatctagaatgctcccacatatagccccgcgctactgcgtacacctcacgcgaatcgggtctatacataataacactccacaaaaagtgaagcggactaccccgcgtataatataacatgtgcgtgacattcaagcctttgcatatcttactgcattgtatacctgctccactcgaattcgatatcgattgttcgggcgatcgtaataggatgacggctggctgcccggtgtaggcatcttagtctacacctgcatatgggttcaagtcgataagactcaataggtagcccgacggggttacgtacgctttgtgctgatcgggaataacataccactccacatcccactccgcaaattatccataggtgaaataagtactagagcggcatacttcttacatgtaacgcttcatatcgccaaaagtctggcctacattgccaagaatatacaatcggatccacattaacttatcgcgcatatcgcccccggcctcaacgcgcattatacgagaagcattcgtggcagtgttagaaagcagataggatctcccagaattaacagaatgaattgatttgcaatcgctcttctacctttacgaaagtatcctagataaaaaacacgaaatatatgcggtgtatacgggatcctaccagtgaacaagtaaagggcagtatatattaagaatggcgcccatagagcgtttttggttcgtatttccgcactattgacaatccgaaagggacacctggcgccgacaggggaggccgaatagagcaaattcaaggaagtggcgaaggaaggactttttgcgacattacatcaactctacaaggtttattccaaggttgctaccgcgtcagatgcgctcgaaaagtatgatctacttttcgggggccaatcctagtatgtaagctacaaactataaatgtaatgcaaaacgctccttccagaactgagacatcaccccacctctacgcaacctccaaaatttggaatggatgtcagcttcgttaaagtacgccgatcggcaggagatggttgatgcgcggaacatcccttgcgggccgcataaccgtaatcgtgcccaagccggagacgggccgggcccgggcatcccccacggggaaaaacgtaccgccaataccgccttactgaacgcgaattatagaacctttctagaacggtacacaagctgtacgcaagccgtttgtttcgtgaaaaatagcattcttattttcttataaatttctaaacctattgcttattttcttatgccattaaacagagataattataatgcattcagtgattctgctggcaaaatatcatgtaatctatgcggtgtggggacacggagcaaatacatatgtccgctgcctgcaggtatgtgcaaacgagttcagaaaatggcatagaactagataatgagacccccactttcagttcagtgagataagagaagatcatcaaagcgggaaaacaaggctcgggagatggatcaatggcgcgggaggggtctaggcgccacgaggtctcatgcatcaaaatgcccaaagattccgggatttagaccattctatagtccgctctgtactagcattacatgatggttattttcgtctcaccttctgtattgagattccaactccggagggtagtatgtatgtatgagcatgacttcccaaatcatgtagtaaggctagatttgaaggccagcacaccactatatagctctagcaagggtttgtggtcagcagagttgtctacttagaacatgggagataaagtaagtttctaggttattgctaaatagtttgaacaacacagccgaagcatctcacgacctaaatttcggacaatctatcagtttgtaatgtaacaaaattctgatttttaatatcttcaacctcagaggtttgcagcccatgaaaattgtgtgcttcgttgtattaattcagtaatttactttcggctgcctgcagaggctctagctggcccccctccgtaaataagagatggatagttttgtagcggactagccctctcgttttttgccttatatcaatcagacttatatcttctcccgaaccaagtttcttatagatctgtaaatatacgatatcctgtacgtgaagggcgtaccaggaacttattacattcttacctctatcgtttcttcatcgagtttcatatcatgtcattgaatacagagcattcaaaaggagaccttcgtcttctcttcggaccacaatgctctgaaattgaagactccatcgcccacatccgggatgccgtatacaaagattcagccggtctggggttcttatctgatattcttgacgagcttccctccttatggcccgtcataacttctgcctggccagccctacggaaggtgcagggggagaagcaactagctgcactggggcggcgttttgagaatggatctccagatagtgaagcagaaccctcaagtctcatcatgactccagtcacggtgatgaaacatctagttgacttttggaatctccaaaacgttgcgacacatccggcgtttccatcctcgccattatcacggaccacagccccaaggataatcgactcacaggggttctgtgtgggtattctggcggcaattgctgtggcctgctcccaggatacacgggaattccagtctttggcttcgaacgccatacggctcgctgtctgtattggggcgttggtggacttcgatgagatcgtgtcgggtaaggctaagtcaattgcagtgcggtgggagaccccagcggaccatgactatcttgaacagaccttgacaaaaagtcccaatgttagtttctcctcatggaaagaaaaggaaacaaaagcaaagagctgatagacattcaaggtttatatctcctgctatacagacgttaacagcgtcactatcactatccccggtgacactgcacaacgggtcaaattcaaacaggagcttagcggccgtggtcttcacacaaagccgatccccctccaaggccgcttccaccaccagcaaacacaccgcgaaggcatccagcacataatgaatctatgtgtgaaggatcctcgctttcaactccctcacagcaacgcgttgatattaccccttcgatcaagtcacaatgggcaggtgctcataaatgcagccatgttgcacactgttgccttggaatcaatcctctctgtcaaggcagactggtggggaacagtctccgcattactaaacagcgccgatatggaagttgacgagtcccgtcttctatccatcggccaggaagagttcgtcccacgatcagctagaggccgtctggtagccaggagcaaccttgatgtctacggggcaggagtgtttgctaacggtaacacgtcggctcgctccgcagtgtcgctgcagaacggcacgaacaccctcaatggtagtccacaggcagctgagatgccacctattgccattactggcatggcttgtagatattctaacgcagacaccacgagcgagctatgggatttgctggagctgggggtatgtacagtggagaaggcccctgggaatcggttccggatgccagacttgcagcgggagcccaagggcccattttggggtcacttcctcgaccggccagatgcattcgaccatcgtttttttaacatctcagcgcgagaggccgagtccatggatccacaacaacgcgtgttgctgcaagtagcatatgaagccatggagtctgccggatactgcggatggcagcacactgagctatcggacgaaattggctgctatgtgggagtgggatctgaggactatactgagaatgtggcatcgcggaatgcgaatgccttctcagccacaggaaccctgcagtcatttatagctggccgtatcagccatcatttcggctggtcgggcccatcgattacgctagatacagcgtgttcatccgcagcagtggctatccatatggcatgcaaggtacgatatgagactcccattgacctatctgaaagtgcaatggctgactgatgtataaatgataggccctgcaaacaaaggagtgctcgattgccgtggctggcggtgtgaatattctgacaaaccccagggtgtaccagaacctggctgctgcttctttcctgtcatctacgggagcatgtaagtcgtttgatgtctctgcggatggatactgccgcggagagggcgctggactcgttgtccttcggccattgcaggatgcgattgacaacggcgaccctatcctcggcgtgatcgctggctcagtcgtcaaccagggctcgaacaggtcacccatcaccgtccccgatgcagagtctcaacgatcgctgtatagaaaagctttgtcactcgctggggttgccccggatgaggtcacctatgtggaggcccatggcactggtatgtatcctgctttctttttacccttggtctcctctattctgccctcttctatttcgcctgcagtttagtaacaatgtcaaaggcacacaagttggagatccgattgaactggaaagccttcgcaaggcatttggaaacccgctccgaagtcagagtctccatgttgggtccatcaagggtaacatcggacacactgagacctcctcgggggtcgccgggctgttgaagacgatcctcatgcttcagaagcaacgaataccgaaacaggcaaacttcaggcagttgaatcccaaggtcatgcctccactcgagaacgaccgattggtgattcccgtagagtcaaccaaatgggcatcagcgagacgggttgctatggtcagcaattacggggcatcggggagcaacgccgcgcttatagtgagagaccacactcctagcctatcgggacaggggaaggcaatggcggaatacattcgagatatgcctatcttgatttctgcacggtctgaagaatctattcgggcctattgcggtgcccttcgcaccacccttttgaggcatccgtattccaataccgtcgtccgggaattggcgtacaacgtcgcaatgaagcagaatcgaacactgccgtttactcttaccttttcaacctcttctgatccgacatcactgagcacccgcttggaggctatcgccgcaggcaagtctgccgatattatccagaagcgggaatccaacgagcccccaatagttttgtgtttcggcggtcagaatggagttacttcgagcatttcacaagaactttacgacagctgtgtccttttacagacgcacctcatggcgtgcgagcaagcaggccagaagctcggccttcccagtcttttcccaactatcttcacatcagaccccatcgtgaataccgtttacctgcacttcatgctcttctctatacagtacgcatctgccagagcctggatcgactcaggactgcgcgtagaccgcatagtgggccatagctttggtcagctcactgcgctatccgtggctggcagtttgagtgttcaagaaggcatccgcctggttactgagcgtgcacgcctgatccagtccaactggggcccggagtcaggggtgatgctcgctgtggagggtacgcaggccgaggtccagcgtgtgctagagcagacaggccaccgtgctgaaattgcctgctataatggaccacagcagcaagtgcttgccggcacgggggaatgcatccgagcggttgaagacgctctcgctacaaacccattgacaagcaacgtcagggtcagacgtttggagaactcgcatgccttccactctagacttgttgatagcattgtgcccggcctcacagagctcgcagagtcctttgtctaccaagcaccagctatccccatcgaagcctgttcggcgactggcgactggtcgattgtcaccccggcaaagatcgtcgagcacagtcgcatgcccgtgcacttccaacgcgctgtcgaaagaatagctcaaaaactacaagttcccgctgtctggctcgaagccggctcagcctcgcctatcatccccatggtgcgtcgagtgctggagaaatcgtccgcaactcacacataccatagggttaacctcgatgggtcggacggaagcgggaatttggcaactgtcaccagcgccctctggggtcagggcgtccatgtccagttctggcccttccatcactcgcagcgtgggaccttcggctggatgaaccttccgccgtatcagttcgcgaagaacagacactgggttgactttgaccctactgctttctcgttttccggatcctccgccgaaccgcaatgtggcagtcaggagcgggctggcctgttgcgcaagttgagcgacggcccagaggagtatctatttgccgttaacacccaagatgtattgtataggtcatgcacgaaggggcacgcggtattggaccaaacattgtgtcccgcatccatgtatatggagatggtcctgcgggcagcaacttccgtattcaccttgggtgaatcctcaacgctgactatgtctcatatcgaggacctggtgatatcatcccccttagtattagatccgcaaggaagcgtgttcgtacgactgatcccagaggcagtggcttcttcccagacgtggtcattctcgatatttagcagtagcgggacgggtaatgagtcgtcgattcatgctacaggcagtgtatccttatgcaatgaaaggtccagggctctgtcacactttcagtctatgaatcggttgatggacccggcacgggcaagaggaattgaggatcatctggcatcaaacggactgaaaggatcgacggtttactctgccctcgaacaggttaccaattatgcagactacttccgcggagtgaggcaggtgtttgcaaatggccgtgaggctgcggggctggtcagtatggcaccgtcagccactgagaccacgtgcaaccccatcctcctggacaactttctgcaagttgcgggaattcacgtcaactgcctctctggccgcgaagcagaggaagtattcgtgtgcaatgctatcggggaaacgtatgttagcgattcgttgttcaaaaaggaagacggagctattccgttatcatggaaggtatataccaactacgtccggccgtccaagaatgagatcgtgtgcgatatctacgtgatgaactctcaaggagacggtcttaccgccgcaattatgggcgttcggttcatgagtgtctccatccgctctctcactcgcgcactggccaagctgaacaacaatttccctgacgtcccacaactcccgcccacgatccagccagcaattgtgacagccgattatgatgaagccagtgacaatgtaaatgtggatagcgaccttgttgcagtccaagagatgctttgcgagctgtttggagttagtgtcgaagaggtatctccatcagtctcgctgatagatatcggagtggactcgctcataagcacagaagtgctctccgagatcaagaggagattccataaggatatttcctattccaccttggtggatattcccaacatccagggtttgacagagcatatcttcccgggacattctcacctagctccttcccagattgtgatcaaaccagtacggcagcagacagtgataccgcaaactgtaacttctctgcctgtgccagctaacgccggaccgtcgctagtctcagtagcacaccaatgcttctatgagactcacgccgcggtatcccacacacacaatgccgactgggccggcttcttcaatgccatctatccgcaacaaatgacactcatcacggcgtacatcctggaagcattccgcgccttgggctccccgctagagtccagtcaggcagatgaggtccttcctattatttccgtcctacctcgccacgagcagttgaagaagcacctgtatacaattttggaatccgtcaacctcgtgcgccaaactccaactggtcaactcgtgcgcacagcgacacccatctcgccgctctcatcacacgccttgcatgcccagatccgggatgaacaccctccatatgcactggagcacgatcttctacagatcacaggctcgcggttggctgagtgtctgaccgggcaagcggacggggtatcgctaattttccaggattcccagactcggcgcctggtaggagatgtctatacggactccccggtgttcaagtcggataacctctacctcgcacagtatctcacggatgtcattcaaactctcggaaacggtcggcaggttaaaatcctcgagatcggggccggcacaggaggcactaccaagaatctcctcgagcagctctcggccctccccggaatggcgacacgcatggagtatacattcacggatatctcgccatcgcttgttgcagccgcgcggaagaagttttccaagtatgatttcgtacggtacgaaactattaacgtggagagtagccctccctcgctcttgcacggccaatacgacattgtgttgtcgaccaactgcgtccatgctacccgaaatctcgtcgagtcctgctcaaatatccgcaagctcctccggcctgatgggatcttgtgtctcgttgagctgacgcgtgacatattctggttggatcttgtgttcggactcctggagggctggtggcggtttgaggacggtcggaagcacgcgctggccactgaagatctttgggatcagacgcttcgccaatctggcttcgagtgggtgggctggacgaataatgaggctgtagagtcaaatgctctgcgcgttattgtcgcatcgccgacgaaggccccttctgctctggagatttgctccaagccggcaaacatggaaactgttgtttggggcgaaagaaatggtctgcagctgctggctgatatattttatcccgacgtggttgacaccacgcagaaacgacgagcatgtggtaagttcaaattcatcttttgtcccttgtaataactccatttcatactttcatttgctaaccctcttcagctctgatggttcatggaggtggccacgtcatgctatctcgtaaagacatccgtcctgcccagacacagacccttctcgatgccggattcctgcccatcagtgttgactaccgcctgtgccctgaggttagcctttcagaaggccctatggccgacgtgcgcgacgccctaggttgggtgcgccgcatcctcccaaatatccccttgctacgtccagatatccgaccggacggcaaccaggttgtggctatcgggtggtccactggtggtcatctcgcaatgacgctggcttttactgctcccgctgtgggtatcgccgctccagaggccatattggctttctactgtccaaccgattatgaagatccattttggtcgaggccaaacttcccctttggacagactgtcgcgtcaaatgatatagagtacgatgtctgggaaggcgtgcagagcgccccgatcaaaggctataatccagcgttcaaggaacggccactagggggctggatgtcaaccagcgacccgcgtagtcggattgcattgcacatgaattggacgggacaaaccctccctgtgctgttgggaggcatgcacaaagagtttcgcatacctgatgaactacctcgtccgacagacgaagagattcaggcagttagtccaaactatcagatccgcatcgggcggtaccgaacacctacgtttatggttcatggaacaagcgatgaccttgtcccgtgcgcgcagaccgagtcaacatataacgcgttgacccaaaacggcattgaggcagatatcagggtggtgcagggagcggtgcatctatttgatctttatccgagctctcatgctggccagaatgcgaaggaagcagtggctgatgggtatgaatttttgaaaagacacattcactctaagggttatagcgacaaggattagatttagattcaaattttgcttccgcattgaatattacaatttgaagattatattgaggtcttgctatatctacaacatccagaacgggcgagaaaatggatatgttcgggttcactaacgctggagatttgacaagttggaacacgacggtgtgccaataagcggccctggccgcaacaaggaggaagaaaacgaagttactctgtctttcagtttacaatctaagagtttagtaggctgtacagatctgcttttcttccaagtatcccatgcggtctgaacttcactaaatcataagacttgctttaaactaatgaaaaggacactttcccgtcctagaaatcttcagttccttcatcatctcctcaattgccttctgcccctttccttcaaaatacttcggcccgatatcgtgaatatgataccccttcggatagtacttctcaccctggtcgcccgggacaggatgaccgagcgcccaggaaacccacgccattggaccccatctattccaaaatgttggtttcacgtagtagggaagtgcgtcccaagatttgcggtaatagcggttgtttggatcgggttgcttggctgtatttgacaccgcgaagatcaaaggtcgtgggggtgttaggtagcggagaatgaatgtgcgggttattaggagggcagagaagacttttgtccagaatggcgttggtggttcgtatctagttgatgttagcgctcgatatttcgttttataagatcagatcttactattccacatacaacatagccttcctcagccggtcatccatcatgaacgaagtgaactgcaatcccaccggatggaataccttcggcaaattataaagcagcacagctgttgcctgatccgctgattcccgattctgagcatctggaaccatatacttgacctcatactcctgactccaagtatccacctcctcgagccaatgtattccatccctaaaccccgtcttacctgacgggagaatgtcagaactaatacctagcgcgtcacctagactcttccaaaacgttccaatagcacagcgttccaaatcacttagcggccgccactcgaatgccgcgatgaaatttacaggctggacggcaaagagcgcaagtgtgtagagcaaatctgtatcaaggatcttgcctgaagcttggtagccgctgtgtaggaaacgcgtgcgggctacagagagaaaagcccgttgcgaggtagggctattttctaccatttcgccgataagggcggctgtgtctgtatagcgcttgaaggaggtttctggtttagaaaattgccctgtctttatgagaaggtgggagattgttggaatgccgtaagtctagaggaggttagaataagaaaaatatagattggtgtatatatttgcgtacccgaaataaagcaaactgccctgctttcacaaacatgaatgggaattctagctgcgccgtttctttttgaatctggaatgcttcttcgtctgtcatcttagccatagactcgcgtgtcgggaagtagaactttttttgtagctgtttaagtcgtctatagcgcagcgaattgataagaagggggtacgcaatcaacaagcccactgcaaatgaaaaccattgcggcatggtattgaaaatagctctggtggttgcagagaacgagggagttgtaaagaaagatgtgcctttatccataatgtggatattgtagttttgaagggtatctcaatcccatatagaaagctctgatatttaaatgattactggccccaaggcccatagaaaggggctatttatgtgacgccatttacatgtaactagctggtcataatacaagtactgtagaacatcgaaattcaggcgggcttgaagcaaagcccgaattattcttgatcattaggtcattgtatactatccgtctctccttgcacccaattatacgcaagataaactgaaaaaaagacacgaggcaactattctatttcaaccgtagacccaggtatcacatgtaccgtggacgtctaaaacaaagatgatattacatttatcttattcgagattttccgtaactgttttacatctttgtattattgcccttccatatgtatgcacatctatggatctagtaagcattctgcaaaggatggagtcccgcggggttgtatcgtggggctaatcttatacccattgagtctcttgcatgggcctggctggccccctattattatttattcagatatactccgtactatacagtgcttctccaaaagtacatacatgtacggtaaatactgcccgcatattacctagtactttggtgtagatgcattggtgtagatgcattatggtataggaagcagctcggtcacgataggctccacggtagctctcgctgcggtaagacggagcattcctcgtcactcatgcacccgctccaccgtctatgttattctcatgcatggtcattagaaattcatttttctgatagtcaccataacgtggatacggcaacgtgggggcagaaaactgcaggatgatgcggcaatgtggaaaaaccgggtctcttgtagtacaggatgtctcccctagaagtgctttgtgctgcgataccgggtataacttttgatagttctcaaggacagcccgattttctagctcatctgcaaagtttttgagtttccgtctttgaaggatatttgccaatctctaacactttattgcatttcattcacaaacatggttggttcaatggagaaccctggttcatgggaccttgcctgtcttctgatcagcacctcgcggttcaaccgatatatgccctactacacgatgatggccgctggtaaggagagcaccattccaagctctctcatgaataaagtattaacttgaaatctccgtgacaaaacagtatggtctaccttgattgctggcgctttaaagttgcaagaggatcccgccagtctctctgtcgagtacatcctcttcaaagccggcctgtgctttgttcactgcttgttactatgcggtgctgggaacacatggaacgacctgatagaccgtgatattgacgccagggtggaaaggacaaaaatgcggccgttggcatctggaaaagtctcaaccgtcgaggccctggtatggatggtcggtcagtattttctgtcggtgaaaatgctggacttaatattggataacagaagcatgtaagtctgacattcagtgtgataaaactccggccgcatggaagagcacaacttgattaaccccgtccatccctcttagatggggcttaatgctgcctttgacagccagtatcatgctgtatccctacttgaaacgacccgtattcagcagagtcttcatctacccccagtatatccttggcttggccgtcgcctatccatcgataacaggctgggcctcaatcaacgggcaagagcagtccatgtctgagatcttcacacattgcaccccgatctgccttcttatcttcttctggtgcctctatttcaacaccgcctacagtcaccaggacagcgtcgacgaccggaagatgaatatcaattctgcctatgtggtcgcggggcaacgcatccggttattcctcgccttcctgggtgctctaccactcgcggtgattccgtatgttgtgttgaaaatcaactctccctggctgtggttctcttggatggcggtttggaccgtttctattgtgatgcagattgttcggttcgattcgaagaagcttgaaagtggcgggcgtattcattgggacaactttctgttgggactgtggactaccgttgcttgtatagtcgaggtcggtctgcagaaagtagagttctggaacctaatctagtataaaatagtataagatattctaaattcattctttctaatttatagttaactagtgcagtggggaaagtcgggatgcctagtttagtggccttgtccttcaggcagagaaaacgaaagcctggttgtncaagtagagtttcggggagcaagtagtctagacggatcatcaccccaagaatgaaaaacgagttgcgagatgtttgtgtactaggagattatatgctatggtgtggtctatgtgatccctatgcttgctagctgaccccccgggatggttggtgttgttgtgtcgtcctcgtcttgcctgcatggccaggctgcccatcgtgcatttccctcttcactatctgctttccactttgcctatcgtgcatttccctcttcactagttagttagttaattccccataataattaatatgatcacctgatctatcaaacatgaagctattcagagatcacccgatctagcttacttgctcgtttgcttacttgcttactgtttgcattcaatgcattgtttacattgtttgctagatagctaagcaagatatgcggtatttgcactgtttgcatgcaaatagacagctatatatacaggcttcctcccactttgcaacttgcttcttctttctctccaccattatgcctgctaccaccgaggattctaccatgctttccattgccactgccaccaccgaggatttcaccatgcctgcccctgatcttgcaactaccaccgaggattccaccatgcctgcgataccatagtaaatggtccgtgtatttgaaaatggagtgccaagagtgaccttgcctaattaggttagacccatgccaacagtaagaatcttacttcatgagaggaaaggtctttaattgactgagtgagacaaaggttgatcgactgagaagaccaagcaggtttatttggtttcagtacttcttataccattattgtttaaatggctggatcaaggattatggatcatggacaaactattttagtactgagaggaagaaccacagcacaactatctagggagagaaaaccaatctagatatccgggtactataaaaatttgagttgaacatggtaagtgggatcatgatgaaaccttgagccttttggaagggggaggttgggaggtcgactgatcaggacaatgctgtccttggagaagtttcactatactgtgttgccctcctcgacgagccgcttggagagtatttccgtatactccaccctgggcgttgacatcggctcctcgctctagcagtatctgtgcgattgtatcgtgtccactagagcaagcagcctggagggcatttccgtaccgtccacactaggtattaacatcggctcctcgctctagcagcatctgcgtgattgtattgtatctactagagcaagcagccaggagagcatttccgtatactccaccctgagcgttaacatcggctcctcgctctagcagcatctgtgcgattgtatcgtgtccactagagcaagcagcctggagagcatttccgtatataccaccctgagcgttaatatcggctcctcgctctagcagcatctgtgcgattgtatcgtatccactagagcaagcagcctggagagcatttccgtacactccaccctgagcgttaacatcggctcctcgctctagcagtatctgtgcgattgtatcgtgtccttcagtacaagcagcctggagagcatttccgtaccttctaccctgagcgttaacatcggctcctcgctctagcagtatctgtgcgatcttatcgtgtcctttagcacaagcagcctggagagcatttccgtaccctccaccctgagcgttaacatcggctcctcgctctagcagaagttccacagtcctatcatgtccattcaatgaagcccatatgaccgggtatattcctgtatcatcaggtgtattgacatcacttttatccccaccaagtattaaatgtacctcctgttcatggccattgaatgctgccagatgtagtgcactcattacagaagtttctctgtatggtctgactgtcttccaaaaaatgggaaaccacattgagaacggtttgtcggtcatgtcgtataatcgatgcactcggtaggtttctttttgggttgaagtcaaacccatctttcgtacgtgatcaggccaatgtgctgctgaatattctaagaaacttcgagtataggggcgcgagtcatcttcatcatattctaaatcctccatcaataagtatctcaaacaaatctcagccatctgatcttccgcatcagtcaggctgttccagtatgaaggattgagattgctggaattgttcttcgctataagaaattctctggctgtttgatggatgagataaattttcgagttgttcgtaaagacaaataggccgcaccatcgccgaagcttgctgtccaaattaattggatctagcccagcctgtttggttgttggtgatcctgagctagtagcaattcccaatgccatagccatctctcttatggtcagaggacgccgtgccgccacgataatctctagaatcttcttgactctatccattagatcggctgggactcgacagagtatcttctcatatgctgcattcacagaaggcggaatcagtgtgatcaaatcctctgtaggccgaaggctgtttttgaaggtagtgcggatatcatcaatggctagatgtagccaaagatatgtacggtgttccatttgaagcagctgctgttcgattcgatgatgaagctccgttgatagtggcactgtctcaactagttctctcactcgaatccttaccaccagatcaatctcatcatgaatttgatcgttctgctcctcccccttgatatgtatatgtgggaaagaatcggtgattactcgaaagtgatcctgtatatgatcgtagggacgactggtgaccaggaatttcaaacaggttccctccgttgatgaagatggctggcgataaaacgcttcaagcttttcaattaatcggcgctggtctgtttcacaacattcatcaagtgcatcaaatatacaaatcgtcttgcacgatatatcagctgatgttgccgctattaagatccgccaaagctcattaacttcttgccggagcagcctcccattcttttcccaggccggaatggcatattgtaatagatgaggctgctggctgaatagctgatgaagtaccgaacatagtgctgtagcaagattgttctgttcatcattgtctttgaagaaaaagtaacatattctcacagctggatgagaggtctctgagtaatcatcgattattgatctgaccaggacagacttgccacagcctgggtcagccgacacccagagaaggtcgttgcaattgctctcccaccaacggatatattcagagctctggaaaggccatcgacaggtgcccttagctcgatttgggtttatgttcttttgctccgcgtagttaacgatcttgaacacttggtaacaacggcgctgctgatctgttaagactcttgctttctgttcactaaagtgccgctcgttttgactatatgcttgatctaatcgatgttggatgcctttcagctcctctgagtagtgcttaggtcaatatttgctgacgtaataattataagactgcacaagactaaccagacacaacagcacttatcctctcctcggcttcaattctgttgagagggatcctcttcagaaggtctttggcatatgcagctgccaccatagctgcatacccttgccactctttgttcttatgtgagtcggagtaatcgcagataccccggatgacgagatatgggaaagtattcatcagccccgcggcttccatttcaaagcaaaggacgtctttttccgcggtaagctgatctcgaatcaaagcattcttcattaactgattgccggaagcaatcaggccatagtgaatggcagggttatcttcgtcgtcggcccgctcactccgtagtaccaacgttgaaggatcaaccgcacatttagcacagtctgcttggtgatggataacttcgggaagaaacagcctatctgtcattggctctggccttttgtacttccgacgtagcctcatgttctttccaaaaatgccgttgatggcctcctcgagctgatgtccttttctctcgtattgagttcgaatacctgccattgcagcgcgcaatatagctggtggctggttcagaaaccgtgcttgctgaaaactttggtcctggatcgacttgccaaaatcgtattgaaacacaccactctcgctaccccgagacgcactgaccacaacatcgcccaatcgaatatcatggttttcgcttggtacacccccccccaatcccgaccataaggccgatcctgatgttgtgaaaactgctgagcatatttgtcgctacactggccgcggaagctgttccatattcaccatcgggtaagacggcaatgacgacgttgtgttcgcccatcttgcctaatgtatagtcgttggcatcgtttggcgacacgaagctcggtctgtcatgctcttcatcgagaaactcttgtgcggcaatgtattccacgggtaaggcgcaaatccagcccacagtgtaccctgcaggatctgacatggcttcaacgcgagagaaaaagcccgaaaatcaggtacccgcgtgacctttcgaaagtcctgacgtgcggtgtgcaatagaggcctaagttatggggacaatatatgcggctgtgagtaaaggagaggggaggaggcttgagagaaggaagaaagccctagaaggtagagagaaaatgtttgcctaccggggagggggggggggggggcgtcagcctcatgatgtacacgatgtgcagcagcgagcggtaagagaaaagatgctattggcaggagccgtcttctccatcccctcgaagcaaagaaatgctaagatcagccttggaatgcactcatatggtccgtaatttcgctgtaaattacagggaaatacattcaggggggattatattgatgtccgttaaacaaaaattggcgctagtgccttgaaagtgggtcctgagaaaagaaaagcagtcgttgaagagggcgactaaagccacaacaacgaattggactcaagccatatctcatttggggctgtgtgcagatgccaagggactacgtgttccagagtcaacctataacccaatcatgtcacggtcctcgtcacctgagggggtcagtgcgcccgtcgcgcgcgacctggggtgaatctcaccctgatctcacccagcttctcaccctgtttatagtgcactcacccttctcgtccgggcgacacccacccgactacatattgactgcgtataagccacacgccggtaagttagtagttgggtgggtgaccaccagcgaatctctactgttgtatgtctgcattcacctttttctttatgattcgttcggaaacttccttttgccgccctagtcccaacttggtggcctgagctgttcctgatcgaagctgatcgcagaaaatagattcaccgtggctattataactgtctggtttggtcatagttatctcttccctaaggatgtagtgaagattctgactaaagcagaggtgcggaaacggatggctcgctgtaatggaaataaccacaattgaagagctctcccatggccgaacgcatggagtactggatggacccccactaagaaggaccccagcgctccatatccagggaaacgatctatactcttaggcctattgggttgttggttcttatattccctacgggggtctgatagacattaacatactaatgtttaatcaactactcgctagcaaactttctacttattaggtgcttgtctaatcccgtatatcgagatgaagggggtgagaaagtagcagggttcgcatggattcgggcatcagttaggcacacccaagtgactcaggatgggggctgcagattatagcgtgaattccgagccgtatgcaggtctgacgtagcaaaaccccataaggccgaatacactaagcccatgacccggtgatagaagtaggattttaagaaagattctccccttcttttcgcttgatagcaccaatctccctctgtgcatggggctttagcttgcctttgactcgttgttatctactttgaaacaaactagagccccgtgatcgaccggaaccgactacggctgattaatatcgacattgaccttcggtagcccaaaggcctggtccagtcctcttacaatgactgcgcagatggataccgaacccagaactcacaaggaatacgctgtggggtgggtatgtgctctgccaaaagagcagaccgcggcgacagccatgctggatcgaagacacgtcgggctcccgaaaccgccaaatgaccccaacacttacacacttggatctgttggcaaccacaacgttgtgatagcctgccttcctaaaggccagtttggaaacaattcggcagcgaacgttgccgcctggatgatctcgacttttccatctatcaaatttggcctgatggtgggtatcggcggcggcatcccacctaaggtgagactaggcgatgtggtggtcagcacacccgtgggccaatttcctggtgtggtccaatgggactttggcaaggcgaaagaaggcggcagcttcgaacggactgggtcgctgaacaatccgcctacgtctctgctcacggccctgacggcgttggagacggagcacgacttggttggctctaagataccggagtacttgaaggaattgagggagaggtggccgagacttgtacccaagtacctgccgtctgatttgcaggatatattatttaaagcagattatgggcatgcaagcaggcgccccttggatctcgatgatacctcgaatgttgacgatgtagatgaggacgaggaagagagctgccgattctgcgataaaacacaaattgtacggaagaaaccgagagatatgtctgtgtacttcggtctaatcgcatcaggaaaccaggtcatcaaggatgctgctctccgaaacaaactcaataaagatcttagtagccatctcctttgcatcgaaatggaagcagcggggctgatgaacaacttcccgtgtatcattatccgaggaatctgcgattatacagactcacacaagaacaaagattagcaggaatacgctgcggttgttaccgtagcatttgcaaaagaatttctggcattcttgcaaccaactgatgtcgagggagagcggccagtgaaagaaatacttgggcagggttagtcaactttaagatctttttactaatttggccgaaccccgctcttattagcagttcagaatgggcacgatgcagtggtgaagctactgcttaagaggaatgctgtcgtcgattttcaggatacgtatggccgaactccgctctcattcgtggccgagaatgggcacgatgcagtagtgaagctgctgcttgagagaaatgctgccgtcgattctcaagctcaatatagccgaactccgctctcctgggcgaccgaaaatgggcacgatgctgtggtgaagctactgctagagaggaaatcctagatcaaatcttcgaatcgtgaatattcccagtctccgacttctctctaacgaccaactcaggtgtgagggtattaatgataatatctttaatacagcagcacaaaagcgagaggagatgcgccaaagttgagatgaggcaggcttttaatgcgaacatacattgaactatcaccatggagattagcctcaaaggatagggtgtttctcctaacgtagttactgtaggatatagttgttgatttccatccgcttaaatactttcttcaagatgcactgtgatttatgtaaagaaaccacgactttgtcagagagcggttgattggttatgtttaatcattggattatcagttaaaacctttttttccagaacccgatcacaatattatcgagaagccaccgaccccaagaaaaaagatggggagaattctcacttccatcaccaggtcatgggctatggatttatgccacgtcagacctgtatgtaggggtcgaaattcacttaccataatatgcgtcccccacctcatcgcgcaaccgtcgcacggatctcagctggattatgttggaacatcattgggtggaccagtcaaaatgggtgacctgtgcaccctaacggtggcatccaaaagtcgacaatgtcacgtccgtctgatgttcagtagcgtgcccgttgccctgaaccccgtcagctaaacaaaagcagaatatcattcaattataccgttcccctgaaacactcggcatattggcatgcgcacatatatgttaattacctctatataccatatatcgtatttcctataggtgttctggggtgggcggcttgcttaccgaatacgataactgttagttagtgagtcctgttgaccgtggagcgtaatggaaatagacgtctgaattgtcatattcatatctcaacgaatgtgacgtcatgaaagatgattcaagccactatcttagtactgtgacttggttactcagtcaggcaacaatttgtggatcgatgtgattccgcctatgcaagatttgctttctagcgctcaacacagcctcgtcaaagcggaacagcctccctggattttttgacttaaacttgggtcattcttatacttcttatacactgagcttaatcaccctttagtacaatactactatgccgaactctcgtataacaagctctgatttatccgtctggcagtggaacgaaggtatatttctcaaatactctgttatgttacagtactaacagtatagaacatggctggcgcaaaagtgaagcccgtctggaagatctgcgaacagacaacccgacacgtccaccctcattgatttcagaagataccaaagtatatgttatgtgagtccagcttatttggttggccccacaagaaaataaactaaaagtagtatgaacagaacgacaagcgcaaagaatatccgcagttctcgccagtttcatcaagtattcatggatgcattttgcattcccaaattctggtgggctgagcatcttggtaatgccaacggctactttggatgcgaagatacagatcatgtagggggagctggattcagtaagtctgctttatgtttgtccttgtgatataataaagggcgctcacactctaccgatactactagacacctgggcgtttttcgaagtcaagcatattgctagggacacgaagtatcactggtctaaaataaagctctttacacgatggctagagtcgactcatcagaccggcattctgctattcgacccaaccgatcacctctcgactccactgtttgatccgaatctgacagaacttgatgacccattttggatgtaccccgatatattagaacaggttgttcggtttcaagaaggttcagtatggggcatccgagatcatgttcgagatgccgagaaagaacaaaggcctgcagacaaaaagcccaagcccaattacaggcgactccatgacatcgctcggcatgcaattcatgttaccgagtcactagatgtggccgtccagaacattgagcatctcgttcaacagcatgaaatttatataaaaagcatgcaagtggaacctcaacctaaatcccatcaacggatctcccggcggttggcattcttccagagctatatcggcagcatacggcaccggtctgtatcaaatcagctacgactccaaaacgaaattcagctggcattcaatattgtctcccagcatgacacaagtatcactgttgatattagccgtgctacgcggtcggacagcgctactatgaagacactcgcatttattactacgacattcttaccaccaacattcctctgtgcagtgttcagtatgtcattcttccactacgacgcagagtcgggctggggagtttcggacaagctgtggatatactgggtgtgcattatcccaacaattgctgcatcggcccttctctggaatttttggcccaaactatttccagatcatttttatagcgcatttcgagaagaggaaagcacagagctgcctacctttatttgaataaggactacttgcattgatagacaatatgttgtcgatttattatttgttcttttggagcaatagtaagtctccggcgaatcataaattgaagacaatcagaataactaaagctaagaatggtcgtccgtgacctatgacccttcctttattttcggaccctctgatgaaagtggcatcctaaatgagccggtcggtatacccctcaatagacgagctctcgaacaatggataaatggatctagtcgagactctattggaaatagatgagtctaacggaaaatcgtggtaatgcgagtgtaatggtcaatttatacagtatggcgaaaagttctctatttaactaagataatgcagtctttttgtatttggccaagtaatttagatgcagaggaatgagaagaccattgttttcggagcaagtgactagacttatgtacctcttttgaaatggcatcacttaaggcagaaatgctaagaagaacgggcgatgcgtagaattcctaggattaagatgaaatagctatggacccttagaagtttagtaataccgatcactcttgatggcttgtcttcggtttatgacctactgagcaatggcgcgaaatacatgacgttttacgatcagaaaagcggcgagaagtgagcacttaaacggaaagggaaaggtctcgagtgccgggtattattcggtacatatgtacaggacgttcgagttaatgatagaccatccagcaagtgcgttcatgcactgagcattcacaaaagaaagaaactagcaccacagtattattgcaaggggtcatggagatgcatatacttcgaatgaaagactaaacagcggcaggggtcataggggtcgggaacatgacaccgtacaaagatgagatccatgtctggaagccatggagatgagtattctcatcactgccctcgttctgagatccagcaggcgatacctggctctgcgcggttacatatgtgtcccgtgagctggttgctccaagcgaatcatccggctcatcatggctgcccgggcagcagaagaggaaagactgcgctttcacccacgacagaacatccggacatacgggcatgtttgtgtgagggccttcatttgcactgccgccgcagacagtcatcgtgaaaaccgactgcaaccgcgatggcctaggagggatgtggtcgccagttgccctcgttccttgggcagtagactccaccgaatttgtaggaccgtttgagctagccagattgcgcgacaagctgagaaatgtattagctctgggctgcggtgggcgatttactacagcaggggccgggttcgatggagaggggaaatgtcgcctagaggacctggcgggaggctgggcacgcctgcttgggtttctccctaggctatcctttgtgtgtgcaccttcaccataacgatcgtagcttgtatatgtggcttcgcggtggtcaacggaaagattgcgttggtggaaagggtggtcctgcagcggtcgacccatgttcatcccatgtccactttgtcgatgagggaaccggccctgtactagcgtaccatcttcggctcttcctatcccattaacggaaatcccactagcatgagacgcagaagatggcaagccaaagaatctccttagggtatcgccatacgaagtgccacgctgaccactagcaagacctccacattgcatgtttgcggatgaccgtgcattgttatctgggatcatgaactgcgcagagatactcatagcttctgatgtgccgaaggagggaaggccagggggtgtaggcgatctttctggcggtggatatcgaggttggataatcgttactgcaggtcccaagttcccaggccatttgggcctacggatactagcatcaccgagggaaacagccttgcgatgtaaagacgggcggcggtctggtaccgatgtatttccactcaaaggaggtctcgaccggtgtgtggcttgccagtactggtcagataaaagcttggtgtgattcccaagcttccttgccattctctgtcgtcttccttgactggctggcacagtcatcggagtatgatcatcctgtgaatctgaaggaacgaatctggccatgtttaccgctaggccttgctcgtgaacggggttctcttgcaggagagacgcgtagaaacgagggctggaattatttggcgtggtgactctgatcgcattgtatatagatcgttcatcgcttagggtggactcaaatgagtctgggttatcgtatggcgaagtggagtcggaatcgcgaaggtgctttcctcgtcggaggctctgtgatgctgaaataaactgtgaatgagggttactagactgatcgattattcctcgggccatcatcttgaaggcaaaggagcgaagcctggtcaagataaaaatatactgggagagagtaatagacgggaatacccaaagaagagtatgtgatttccctgaaaaccctcatcgtgcctgccgagatcaagccaaaaaatattatacaaaacaaaacaatctatatgtacactctcaaatgaatatgcgctctaaacccgaaaacgttgaatgtcatgatcataatggagtgccacctgggctgggaattggcttgccagtcacctgggcgtgctcctttcttagggctcgcagcaacccttcaagtctgcgacgctcttcttgttcggcctaggaggtgttagttagaaaagagagaaaggcacaaagacaactcaccctcagtatcttcatgttctcgttgcgtgtgtcacgcatcatcttcttgaactcatttttgagcaccatggtagatgtcgtctcagaagtgccatcgcggccaacagatgtgggactactcaagttcatccagctgatacgttcttccgccagttgtgtctcgagttgctcgcaacgatcccggagagtgtcaatgaaaatttcgaatcgttcgcgttccttctcaaactcgatgctggcttttgtcatggcttcgtagtcatcgataatctcgcgaagttctctttcaaggttatccgcccgctgctgaagatcggcacctccgcggtggctcttcagagaggccagttcttcggtgagctcgatatttcgggtaaccagagcatcgttctccttttggacattagggttggaagccacctctgccgcgcgctcggctcggctaccataggcaccatccagctctgccttggccattgtcagttcagttgtgacccgcacaatctcgccttcaagttcagtcaactcattctgcaggcgagtgacgttctggtcggactgcgcgcgctgatcatctgcttccttaatgcgggcatcagattgaatccggatctgttggattgcggtttcgagttgagccacctcttgctctgcacggtcacgggcacccctgacctcctctgatctggaatcgctatcgttctgcagcgtttcaatgacgctctgtaggcgttggacctcgttctccgcgcggtcccgggcttccttgacgtcctcgcctttagcaccgtgctcgtcttgcagagacccaatgatgatatgtagacgcttggattcatcttccgcatgggcgtgggcctctctggcttcttcggtcttagcgtcgagatcattttgcaatgatgagatgaccgcctctagacgcttgacttcgtcttccgcgtggttgcaagcctctctagcttctcttgcttcttcactcttagtggcattatcattctgcaacgacgcaatgatgacctctagacgcttgacttcgtcttccgcatggtcacgggcctctctggcctcttcagtcttagtgtcgttatcattttgcaatgatgaaaggacgacctctagacgcttgacttcgtcttccgcacggtcgcgggcctctctggcctcttggctcttagcgtcggtatcaatctccaacgacgcaatgacggcctggagacgcttgacctcaccttcagcgcggtcgcgggaatcactgagttcctcggctttagtatcgttgtctctctgcacttcgtcgatgtattgttctaggcgcttaatctcggcctctgcttgatcttgggcatcccgagcatcgctaacttcgttagtcctggcatcagcttcgctgtgcaacgaggtaatgacgctttgcaagcgcgcgacttcgccctcggcctgaaccagagtcgccttggtttcttcctgagaagagccactgtggcgcatttcgttgagctgcgccatgacaagagccagctcatcgcggttggcgttgttttcacgttcggatacttcgagctctttgcgaacttgggtcaactgttccgtcagttctccgatctgggcatcgcgttcggcatccgacttggaattgagctcgcgttgctgctggatttgcgtggttagaatactcttctgctcaagtactccatccactcgactttccaggccatctacaccagcttgaaggtatgagagttgttcttccagcccctcgccgtgagacgcatcagggggtggaggcaaggtgggcgaacgagtcaaaccaaaccgatcaacaatggtttgcactcgattgttgatttcggtgagttggtgcttccaagcgtattcgacttcaggtacaatatcgcgagaagccacgggagcaggaacgtctcccctgtgcaagacgatattatccatgttattcttgatatagtccaagtgagcgtcgaccgttgctgtgggattgacaggccctccatcctctgacagctgcgggggagggtcaatggattcaccggggttgaactgtatcatcatgtcatgcatgcgcgcgctaagttcctccaatcgtcgttctgtagcctgcatggcctcggtattcattacgccggccgcgttggtctgggtctttccgttcaagccaaagttatccaaattctcagttgtccggtagagactgcgatcgtcgaatttgtcataggtgctatccgaagtgctcggagcagggctcttacggcccttcttcagacccttgtgtgtcatctgcaagacacccgcagtgtgctccagcaagcgctggcagatcgtctgagacctcttctccaacctccagagttcctgcgccaactcctcacatcgtctctggctgaccgcgagttcagagtcgctcttttcgagggcctcagaagccccgctgcgaccaaatatgccccggctcatccggttcgagttcgaaccaccattggtattgtattcgccgctgctccgtggactgggcgggctgtagagcctaccgagagactgcgccgcgtcacgcagttttgtttcgaccgtcagtttccgcttcgtgccctggatgcgaatggaaagtagtgtcatttccttcttcagctcttccacctcttccaaggacaggacttcgtaattcgtgctatctcctatcgcggtctcggtcaacatgtacatcgccacggggtcgttggcattaaggagagccgagcttcgcgggtgatccggattgagctaccaaaaacaaaggaaccatggtcagctagagtccgggttggtgtgttgtgtcgctactcacagggttgtaccgcgaccggtcctcatgttgggggtctagagtatctcgatacccgtccactagtgtctttccaagcggcggcaccggacctggagcatcggaggcgtttatgctcacattcgatggataccgcgagtccccgtaggaggactggctggagcgcatacttgaattcatggtcgttcaatggccagggtccctccaattggaattcgtaagagaaattcaggaacaggcgtcgggcatcatgaggccctggagtttgcgatcggagagaaatgtagtaggggtcactatgggttaggggaagagtggagagggatctgtatttagcgaaggcacggagtagctaatattaaaagatggcggggagcaaaggagaaaatagacgatcggcatcaccttagggttcagccacggcaatttactgtgtaagatgttcgatttgtattctacacgtacggcgtagatatcataaatttacagattcaaggttcagattcatagatttagatgtatggagtcaatacccctgaatacgtatacgagatccaaggttggtcattccactttctttgtcttcagaggtgattcgtttagagaaatccactatattgtacagatacattctactagacctactgtgcacccactgtgctatatccgacgactatattagttggaaactaagataagccgacctcacttggttcgacgatcaaccccgctgtgtatctccagtagtacttgatagtacttgcgtaatgcagcgtcatagtagggctgctcaggtaccgccaagtacccggttgcgtgtacctcggatcccccagagtcacattgaaaaagccaagagactaaaaggatgggagaggccgctttgtttctctttctcatagaggcccacacagaatgaatttggtctgtcacacttcgctgtggacatgtcgaattttggctcttcagataccgagcagggctctcgacctacctacaaggtctataagcgacgcttctggggcttagcccaactggtattgctgaatattgtcgtcagttgggatgtatgcgcgccctcgtgatcgatccatatatcgatttcgcatgtcgctgacgctcgtaaacagtggttaacattctcgtccatctcgacaacggccgcggagtacttcgatgtctcggagagcgctattaactggatgagcactggctacctcttcgccttctgcgctgttagcccgtaagtagacatgaatcgcctgttttgaaacagcaaaagaaaacaaaaatatccgctccaagtatcccacattcactaactatactcccagcatcgtcatctggatcctgaacaaaagcagccccaaaccagctatagtcaccaccgccgcactcctgctagtcggcaactggctcagatatgccggcactagagccaacggcggcatcttcgggctcgcgatgctcggccagatcataatagggttcgcgcagcccttctgcctctgcgcaccaacccgatacagcgagctctggttctcagatcaaggccgcacgagcgcaacagccgttgccagtctagcgaacccactcggcgcagccctcggccagttaatcgactcagaatgggcgtcgaaaccctccgatattcccaatatggtcctgtacatcacgatcatcgtacgtgaaaccccatcccaaaaacttaaacctactcacccattgattcattctcgctctcgctcaccatgtaaaaacagtccaccgtcgcatcaatcccatcattcttcctccccgcctcaccaccaacaccagcaagcgcatccgccgcaaagccgcacacgcccctaggcgccgcagtgcgcaaactaatcaccacgcgggaattctggcagatcttcatcccattcgccgtatacgtgggcttcttcaacagcgtctcctcactgctgaaccaaatcctcagtccgcacgggttctccgagacggaagccggcatcgcgggagcgatcctgatcgtggtgggactcgtcacgtcggcaatcatgtcgccgataacagaccggtacaaacactacctgggcagtatccgggtgctagtgcctatagtggcagccacgtatatcgggcttattttcgcgccgggcagcgcggcgggaatcccgccttcatatgtggttatggcgctgctaggcgcggcgtcgttcgctatgctgccgattgcgctagaatacctggcggagattacttatccgctgtcgtccgagattgggagtaccatctgctggacgggcgggcagttgcttggtgcgtgctttattcttattcaggatgcgttgaaggctggggctggggctgtgccgccgtataatatgcggaatgcgttggtgtttgcggctgtggttgctgttttggctgcgccgtttccgttgacgattgggcttttcgggagggaggttcatcgtcgaaggtgggaagttgatcgcggtgttgagatgcagactgtcgcggaggtgtctgggaccgttgatgatgttaagagggttaggtctgatgattctgccgtggatactgatactctgatcaagacatgagagaatttctgtatcagatttcttttgggatgagcgactcatccatctcagttcggaagagctgttgacgctttgctctttttatttattatgtgccataatgcacttgacgagtctttatttgatgtccctggtcagcccgagttatacctcgtccatattaccttaatacatcatgaatctatgaccacccacagggacttgagtcgatacatcagtcttagcgaattaagcatacttgtagataatctgaccacgacaataacgagccgagttatatgaatcctatagtcggatatggctaagcctagtctaccagagcacaatgcaatctagacagatgagattcgttttaaaacaagagaataacaaaagcacagtttgaacaggcggaagaccagctatctgtacacgcaaggctgagagaggagggcgaatgatctattattctgtttcttcctctgagccctcctccctgccttgaaaacacaatacatatgcgaacacatacacgcaaggaacgaccaaaaacatgatttcacatttctagatcgatcctgcgttctcaatccaaggcggcaagctaccaggctatcagtccgccttggcagccatcataaaaacgggattggtttttcttccggcgtttcggtccaagagtttccccggtatcaatgcggtggagagcgaaggttattcgagggccggatcgatgcaagggttggatggaacgccaaaatcaagactcaatggaagagtcgtttacttcagctccttccagagcttaggagcagcgcaggcagtgacgcagtgagtgaggtggaagactgggttttgttagttgcacaatccggactcgatggaaggtaattgcatggtttttctgaatccatcgttgatgtcaattgcacttacactcctcgacgcagtcctccttggggcccttgtagtcctcatcctcctcctggcgggtgacgcgctcaacgcactcgtcgtagtggtgcttgtagggagcgcagacggcggagtgggcgcactctgagagtgatagttagtctctgatcgagatggccggtggaattcctctttgcaatgccattggtggttttatcaaccacgcgcggatcctgacacataagaccaattggtacgaacaatagcctatgtccaacgatcgcatgacagagacgagaataaaatgcgaataagaatagtaaaagtcaggaaaagaacaaggtcactcaccatcctcgagcttgggcttgatgtcctcgggctcttcatcttcttcctcctcttcttcctcttcttcctcctcggcctcaccctcctcagcctcctcggaaggctcctcttcggtgtcggcctcctcggtggactcgctcgaggcggaagcggactcttccttctcggtgggctcttcctgggtggtctcggtttcggtgtcttgggcgggagcctcagcctgggcctcggtgaaaccgaaggaggagacgacgtcagagaaaaattcggagagacccattgcgacagagatcaattgaatgatgaccggaggtcttgtgtgggggtggaaaagcggaagggggttgtaattgaaggaggttgttggttttgcccaagagctgcttctttcggactggaaaatcggaaaggcccggccgctgagagacaccaattatgccgcacgtgattggccaatgggctccaacgccattcaggacgtgacaagtgcagtttgtgaggaagtcagtactagagttattcctgctggatataaggatctcggaggtacaggataattctactattgttcgttgagacccaacgttggcgagcatataaactcttcgtttctccatttctaagtgcggaagcaccgctttcgtgtcgctaattgctaattgacggggacataatgtacataagatagagaatagaaaggagccaattcaaatatgtgatagaaggacatattgaaatagattcccgaaaactcaggtggcccgtcgtagcctctcctccagctcgtgggctacactctgcgactgaacctcctcatagcatggaggcggttccatgggttcgttgctagtgtcagatgctcgtctgttttctgactcttctggtgtctcactgggtctagcatggctaggagtagggggagcttcatatgcaggcagctcttctagatgaactgctgagagatccacgttttgtcggccccgagtgctttcgcctgtgttctcaacagcctgctcgagtcgttccttaatccgttcgaagttggtatggaaatcaaaggctccgccctccttgaatgtcactttcaactgaacggcaggcagagacggtgaaatgccacccccagatactggttgtaccagagctgtccatacattgggtccaaagaatggtgcagatacatgtgagtcacggacattcaacaggggtgacgagaaggactgaaagtcatcgcttctggatgcgggaaggtagacaacctgacgagggttaaattggtcgggggcatggacacggatgaatactgactctttgattggtgaggtggatgcagccagcgctgctttggactgaaagtttctctgtgcctttatatccggacggtggagtcaaagagacactagtacgaggaggggaagagtagatcaaacgctcgttgggaagacggacgaagccctgatcatcaagcattacccaactaggcagtcagtatagaagctttaagttacatgggtctggtcctggccggccccggggagaaacagctatggaggtagatgcatacttgagagccatgatttggaatcattccagtcgcatgtgacactgtttttaatcagcccaacactcaggagaaatggtggtcgggttgaatgccgaccttcgaaggtgtaaggtgtggatattgcggggagggatcaaagcaagatctgtagatttccccgaagacaagatcaaaaagccaccctttcagagggtttcaaatgaagtgcagacttacaatatcaaattgagggaagtggaagtggaaaggcggggcaagcgcaggcggggagataaagctgaagggcaaacttcggcgttgcacgttgtacggggaaaccgatcacttttttcttccactctcaaatacacaattgtgaaaatgttttccagcttcgcagtagttgtggcaatgaaaatctcgaccccgcaattggcgagacgagtcaatgaatgtagctaagttgtctcccgcggaacctgatccgtctctaagtcagcataatgctagtcggctaagcaaaatatcaatgtctcaaaacaccctggagactctctgatgtatgtgggctcaagtttcaatattagtgaagctggcatagcttttggatatgcaatatttgacgagaattaacaagatgccggtcaagttagtaaaagccaggaagaccctgtacacggtatttataggaaagttcggctttccctaaaggttaaagacgaaagagaagaagagaagtaaaagaaaagagtcattgttgtatagtatactacttcctacggagtattccactgtctatatagaacacatcgtctccaccgtgttgagcttaatgcttcgcaatacgcttggctatagcatccaggtcgatctcatccaaaaacctggaatacagtagcctgacgctttgatccacccaacactctgcataaatgtcttggggtgtttgttggaaagtcggaatgatctcatactggggatcttatcttgtcgcaaatgatgcaagatcaggcctgtgctcacctagaaggggctaaccatgtacaacatagtcaagagtttttcttagtgtgactgatcatatcaactcaagtatcatgtaatatttggaatttacacagagagaacaagagaataatgagttcaaagttgaagttcaatcgtagcattgaacttgccttgttccagcatgtcacgttctagaagcgtccgagtcaaagcgcgcgctaaggctcaaacctttcagtttcgcatttcagcttttcccctcttcttgcgcttctcccttgatttcatgttctaataccctgtctatcggatatattggatagttcgtgctgatctgaggctcgaaatagccaagtaggtggatccccacctgggcaagctcttccggttagccgtactcatattaatctcttcgctagggacttcatgtcgagatcataaccctttcccgattctttcacgattctttgacgatccctcaacgaccctcgagtcttctttcctccgaaaaattgcccatcgggcttctacggcacaatgggagaaaagggccagtacatcccacccctcgttgggtggatgtatgacttggtcctatggtcattctccgtgctcatcgacctcttcttccgcgaagttcaccctagaggttcatggaagatcccccgccgcggccccattattctggtggcagctccccatgcgaaccaggtatgccgctcgcttccggtcatacacacaagatactaatggatgttcgcccagttcgtggattctttggtattgatgcgcgtcattcgcagcgaagcgcaccgtcggatctcatggcttatcgcagaaaagtctttcaaacggaaatttatcgggtttctggcgagagcagtcggaacactgcctgtggcacgtgctatggacaacttgaaacccgggaccggcaccatctatcttcccgacccggtcaaccagccaactctgctacgaggtgtgggaaccaactttgaagggaaaggcttccaaaaggacggaaccattgccctacccaccatcaacggaacatcatacagtactgcgatcgccgagatcaagggaccagaggaattgatactcaagaaggctttcaccagcaaggatgcgctgacccagcttactggacggcaagacattgaccgtgatgggaatttcactggcgatgcatccgcgcaggatccagatttcaagggtaccaagttcaaggttgctccgcatgtagatcagaccgcagtctaccaggcagtattcaaaaggctaggcgcaggcggctgtgtcggtatcttcccggaaggtggaagccatgatcgcactacactgcttcccttgaaaggtaagctcttcgtattcaagaggtacagcagatttactgacatgatacagctggtgtcgccctgatggctctaggcaccctggctgaaaacccggactgtggtctgaagatcgtgccttgtggcatgaactatttccatgcccacaagttccgttccagggccgtcattgagtttggtaatccaattgagatcccctcggagttggtggaacagttcaagcaaggtgaacgacgggagtctgtcggcgctttactggaaatcatctacggaagtcttgtctcggtcactgtcattagtcccgattatgacactcttatggtaagtttctttatatcttaggggatttgcttccgctaacaattcaaaggtcatccaagctgcccgtcgtctgtacaacaccaaaggaaaaaatcttcctcttcctatggttgtggagctgaaccgccgtcttgtgaaaggttacgcccacttcaaagacgatccccggattgtcgctttacgcaagtctattgtaggatataacaaacagcttcatcttcttggaatccgggatcatcaagtggcctacgccaagttcaccattttgcaggtggtggccaccttgatttatcgcctaggcaaattagcgctcttgacaatcgggacgctccccggtttcctgctctttaccccggttttcatcgcgactaagtacatttctgcaaagaagtccagggaagcactggctgcttctacagtgaaacttcaaggccgagatgtcatggccacatggaagcttcttattgcccttgcatttgctccggcgctctatgccttttacactgctgccctcacttattggacatactggaaccgagtcaatggacttgttccagattgggtgccactttggtcgatagtggtgatcggcatggtactcttccccacagtcacgtttgcggctcttcggatcggtgaagtgggcatggacatcatcaaatcacttcgcccacttgttctatctctgaacccatcgtcggccaacacgctggtgaaacttcgagcgagacgcgttgcactggctcagcaagtgacagacgcgatcaataccatgggacctgagctattccccgactttgatgccgctcggattgtcacagatccattccgagatgcgagcgacaccgataccaaggcggacaacggacttccggcgatcagaagaaccagcgtgccagaacatggcgagaaaatgccctcgtcagagcccctcccccgcaacgaatccttccacaacctggccaacattggcttcttctccacacgacctcctagtcgtaatcgtagccgcagccgatctgctagcgcccgacctgggtctcggcacgggctgaagcctctcagcactctcaccccgaaagacccgctcgaggatgtcagttcacggatccgtgatgccatgagggagcgcggagaacgtcgtcggcgtcgaagcgaagatggaagctgggatatggccagctcaggccctggaacaccatccagcggtgatgagtcccgaaaagatctttgagacgtgtactgccttggccatttaatcatttatcatgtcgaccatcaaccatggtgtggtgttcggcgcaaatctgtgtacgtatttactcttatataaccatacacgatatcccttgttttttttttttttatcatgaatgctataggtagtgcagatctgctaaaatcggaagcctttggtatcataattagcagatgtctagaaggaggcatcatcctttacacgattggactgcacactatgcgacgtatttgctcgatcgacgacagcagaaagctcgatttctagcttggcgccacctgatcactcatccccgatagagatgagtaaaatatcgcgtaagtaatacttgttttatagatgaagactgaaacctcggatcagccaatgcattaagatattcgtattggcagataaataactactagaaaccagacagatagaaccgtaatatatcatactttaagactatacgcaccatccgagtgtgtcaaccaattacgaagatgttagctgttgcccagagctgatgttgaccgattcattttcgcctcgccacttccactgggctaggtgaggcgcaggagcagaaataagcccataggatctaaaatcgcacatgaaaatggtgcagcctacgaatttaattacgacgcctcaaattgttcgagaaagtgccggcaaagactttcatcataactgaccacgtcgcgtttcgtagtacaaagccaaatccggccagccgctaaccgtgcaccttttatcttctgctctccagtttctaccccaacttcttgtttttttctgcggagtttaggggtcttatcttcttttcacatatccatcatgccgggctcattgcatatgtcacgcctccggaactggttcctcgcctctccgcctgccgagtacgccatcacaagcctcaaggaactgctgatcggcgcacttcaacagggccctatcccccagcatgtggcctttgtcatggatggaaacaggcgattcgcccgatcacatggaattgagacagtggagggacataatctggggtttgaagctcttgcaagagtgagtgctacattttggcagctcggcgttacacggcagcatccgtcttgtggccgaatctaacgactgatagatcctcgaagtctgctataagagcggagtgaaggtagtcacaatctatgcgtttagcattgaaaacttcaaacgctcaaaattcgaggtggatgcgctcatggaaatggccaaggtgaagctgtcacagatggctcagcacggagacctgctcgatcgatacggagcaaaggttcgcgtcctcggccgtcttgacatgctcaaacccgacgtcttggaggctgtcaacaaagccgtcgacatgaccagccgcaacggagaccgcgtcctgaatatctgcttcccctatacctcccgcgacgagatcgcctcagctatccgcgagacggtcgaggattattccacgccgatccaacacggtcactccacggctgccgcttcccgaaatcccttctcggaatcccatatcgcacataatatccgcgcccagacacacggctcgacaacacatgaatcacacagtgattctgagtctacgtcgggctcttcggggcaggatgatgacgcatcggttcaacacgaccacctcgaccgagtctacggatcgatgtcttcctgctcgtcttccacaaccctccacctcggaaatcagcaagaccccaagggcggctcacttgcgactggggcagatagcccggtctatatctcccccgaaaccatcacacgtcagactttgaacgaccacatgttgaccaagggtactccacccctggatatcctgatccgcacttcgggtgtcgaacgcctgagcgactttatgctctggcagacccacgagaatacggagattgtgttcctcaatgtcatgtggccagagtttgacctgtggcacttcctacccgtgatgcttggatggcagaggcggatttccaagtcccggcaggaccccaatgcggaggggaactttgccggtgaagcaaaaccaagtgatgaaggactagacgcgatgctgtggcgtcaagggggaaaggtcaaagacatttagtgatttgtctgtttatataccctgtgtctacttgcttttgttcagcttcagcatcactggcgtcttgctttttgcggagtttctgttgggcacgcctgacttggtatcagcatatatctatgcatcgccgtacactacattggtcttcggtaaataaaatatcatttacttcctaatcctcgacttcctatacgccagatccgtacttggatgcccacatttgatgtatgagcataggggcttgcttctacggctttttttcttccacgaatcatggatcatctttcttatccatctctccttctattacttcgtactatagatcacaatacaaggatgtccttctgattgaaaacatttagccacaagcagcaggcggtaaaacccttttgatgtccaccccgcgccgataccggttcacgtgatgttgagtcaccgtataccggtcccacagagaagaacctccagttgaaccatccgaacatcatctatcataccaattaattcaaaatggttaagcaaatcgccggttccaaggccctccttttgggttcaggcttcggtacgccccgcgcctctcttccagatctcccagacctaaatgcgcgatgctgccccgcatcgagtttgtagaggcatacatttgctaatttctgatttctcatagtcaccaagcccactgttgatgttctcagcaaggctggcgtcgaggtcactgtcggtacgtccaattgaatccacacgaacgcatattgcattgaatatcgctgacaatgcggtaacagcctgccgtaccctcgagagtgcccaggccctcgcctctggcttcaagaacgccaaggccatctcccttgatgtcaacgacgatgccgctctcgacgctgccctgaaccaggccgatgttgtgatttcgcttatcccgtacactttccacgctaccgtcatcaagtctgctatccgcactaaggtaactattctctagaggagaggaagcgggcaccgtgctaattcactataatagaccaacgtggtcacgacatcctatgtttcccctgcgatgatggagttggatgagcagtgtcgcgaggctggtatcacagtcatgaacgagatcggtctcgaccctggtctcgatcacctctgtaagtgtctatgccatggattcaaacagaccgacgctgataagaaatagacgctgtcaagactattcacgaggtccacgctgccggcggcaaggttacctcatttgtctccttctgtggagggttcgttcgaccagtcccatgttgtatagcggatgtagctaacaaacaacagcttgcccgcccccgaatgctccaacaaccccttgggatacaaggttagcaaaagtcccattccaccaatttgaaagtaactgacgaatggctgtttcaagttctcgtggtctaggttagcaactgtccaatgctgagttttcgcttgaacaaatgactaactagctcagccgcggtgtgcttcttgccctccgtaacgccgccaagatctacaaaggtacgtgcttgattcactctaacaggaaccgagtattaatgcacaatacagatggtgagatcgtgtccatcgacggccccgatctgatggctaccgctaagcccttcttcatctaccccggattcgccttcgtcggctaccctaaccgcgattctgtatgatatttatgcattcaaacgctttggtttcagtcaactaatctttctagactcccttccgcgagcgctacggtatccccgaggcccagaccgttatccgcggtacccttcgctaccagggcttccccgagatgatcaaggtccttgtcgatatcggtttcctcagcgatgcgcctaacagcgtcttcgataaggccacttcatggaaggaggccactaaggaggttctcggcgctacctcgtcctccgagaaggatctgcagtgggccatcgcatccaagactaagttccctaacaatgacgagcgcgatcgtctcctttccggcctgcgctggattggtctcttctccgatgagcagactatcccccgcggaaacgccctcgacactctctgcgctaccctcgagcagaagatgcagtacggtcccggcgagcgtgaccttgtcatgctccagcacaagttcgagatcgagaacaaggacggctccaaggagacccgtacctccaccctgtgcgagtacggtaccgccgagacctccgctatggcccgcaccgttggtattccttgcggtgttgctgttaagcaggttctcgatggtactatcagcaagaccgtatgtttatccgtatcccctttgctctcgagattctctatactcacttcattatagggtgttctcgctcccgtgacttgggacatctgtgctcctcttatcaagaccctgaaggaggactacgatatggagctcattgagcgcactctgtaagggtgcagtcggatcttaatgaatatacttctagtaaaaaatataggaatcgcatagacgatgaatgaataccaaagtgtgtatttctattctatattccaccaaaccatggtatacaccagttcaatgttcacttggacgtcctagtcattgtgggccatatgattggatccgaaggatccaattgccacattggcactcttttgcgtatctgcactgaggtgtatatattaagaaggcgtactacacgttaaagaggaaatgtgatgtttaacctgatttgggattgatttttgatctgattattgttcgtaattagtacagtgctgcggaaaacagagcttacacgggcttctttatcagaagcagaacgcagggctccattcatcttgctatcagctatgttggaaggatgtcctgggtgtttttcaaaggacacccgacggcagggtcgattcgagagtcggccatcttataattttcgatatgctcgaaggcccgaagctgccacaatggcaaacaaagcgcgtatccagcacgccatctatcaaaggagctcgagcagatcaaaacgtaaacttatcttcattatcatagacataacaccatttctcttatcatagcatcattgcccaggtgtgccccagcagaccccaacgtacaaccgcaagcgggggtctcacgggtggaaaagaaagacacgaagtgaaaaagaaagcagagcgaataatctagctgcttgcgctttttgcgatctttatctgtggccaattcacggagagagagaaagaggaaagaagtcttttcggacgtatgcattgttttttgtgtgtctttcatgccaccggtaagagatgtattcgatcagagaatactgccaaacctacaccaaggagaagaacgaggatgattagtaactgattccagtatcgcgagggttttgcgggaggttgagatctgtagacagaggccagattggcaaagaagtccagaagagagggataatccgaaagagatgaatgtgtagacaaaacaaataaagggggagaaagaaaaggagaaatgacatacccaaaagtctgcttaatgctgcgaacatagtacgtgtcccaattctgcttggtgacatcctcctggccaaccggaacaccagaccaagaaacacgcatctgagtaacaccatcgatatcattctgatcgaagttgatctcctgcgaactgaagtggccctcgggccactgagcaagacgccacttctggacgatctgcttgggctcgttgagcgtgacgaactcgccagtcacgtttccgtcaaagatagcgaacttgccgccaacagtggcgccatcgaactggcgcggcgcgccgcgcgtgaacgctgcgatgcgctgcgggtccgtgaaggtggtgtaaagctcggcggccgtggtgcggaactcgtccgaggccgacacggtggttgtgttgacggcgaccttaccggtcttggaggtggtggtcttcgcggctggggtgtcggccttggtgtgcgggtgaacgacggccttggggaagccgctggaggggttctcgcccggggcgtgctggaggtccttgccgtgctcgttgatcagggcgggggtcaggccggtcagagccttgcggatttcgacagtaagctttgtgcgcaccaggtcctttacgggctgcttggagttggagtcggcgcggttttcaatctcgaactgcagacgggagtttacatggttagtattacagatcaccttggcgattggggaatgggtcaattgaacatacgacgtactcatcttcctcggtgtcgtgggctacctcgggaatgttgatggtgccggtgacatcctcatcgtccttggtcttacctatggaagcgtctcagctgccaggtccacaaagaaaacaagaaaccgagataaaatgaattgatattggactacaaacctgagtattctagcgagaccttgacatcgaacagagtgatgaccttgcccttgcgctggctgacatctacgtcgccatccatggacaccagcttgtctactttggctgacacgcccccttcctcgacactgaggccgacaaggttcttttgcaggaactccttggcccagccagaggcatccttgttgacccagtgccagttgttggggttgtgaaggaccatgatgaatgttgactaggggaatgaaagaaaactctgatttggggttggaaagtggatttggaaagtggattgcttcctgtttttgagaaaaaatattgctaaaagttctgttggaaattcctgttagccatgatctttcgcaatggatgaaagttgcatgtgtaaggaaaggccaatgtcaggtctcggggcgtatcccggacttgttaagcgttgtccgcaagtagatggagaatcatctctcagactggtgccagctgaagtctcttcatgtaaggccaattgagtgacgccgaggggcaggttggaaccccacacccctcgttgcactcaagagtgaacgtagtaaaagcacaaggtgaaacttacagttggtgtaatcaagtccaaaacatcaaggacatcaaggactctgaggtgaagtaaaagaaagaagagtcgaggggaaagagagctatttgaagggccgacggaagactctagaaggtgcacgtgactgtggataacgctaacgatttctctatcgccattcttcttcttcgctaccagctgtattctttggatttctatatttttctagttgaaaggagctaggatatcatcaagttctagggagatagaccctcaaccaccccactttacggtaaacgacgttattttcgcatataggctggtcatttgaatataagtatccacaggtatcataccacatggcgctcctctacggatggttcgactatggtttgcttgcttgcgatttgcgatttgcatcttccctttttttggtagattgtctgctagctaggcgagaaatcgatggtttcatgtttgcagaagcggccagctatatataacctgtttcagcaccctctctctccctctctttctctctccgtcttagttattttcaactgatgcactctttatgatctagcacgtcacacctcgtactcaggctaatctacatcccaaagtatgatcgggttgctgatctctgacaggtctataacacccatggatatgtgcgtgtcatagtagttatgtgtcatactatatcaatccctctccctcccacaaaatatcacgccttgaagatagtaactgaatgaacgttcactatggctcgacgctcttatatatcttttcgcaatattttgcgactccgtgatccacccagggtcgaaccggtcgaacccaagaggtccaagacactctggaggatcccagcagaaatagtggaaatgatcttccagcttctttccgatctagaccgagcttgttttgcactgtgttgtaagaggccgcatgtctgctatgtctcacataacaaacaatatagaatatctgtactgtcgaaattgcccaggacgttactacttcgtcgccttcaaaacgaacgctgggtatactgtcatagatgtcagaatcttcaccagaaccccagatggcggtttcttagctggaaatgtgatccccagcccgctatatccgaatgcaatgcttggtgcgatgtccaacacgatgacagagttgacatatgtacatgctcgagtatcacattccaccagaagcaacatccaattgagtactttcgatctcaacaggagactttagaaaaatcagattatcagaaatgatctgggacatttacacatccatgcactgttgagcatcctctggcatgggtgactatcctaactacagctcggttaaacaagttcaccaagactttccaggtgggaaatcagttggtcttccagacttctaaagaaacagcttcgtcggagctcttccaaaagatcggctctagaccaagcaggtatgaaaccggactttggctaaagaacttcttccatgatcaatccaacttcttcattggggatgagagctctaactggtatcaatgccatggctggagcattgcaaagggcaagccgtataacttcaagataacgctacatagagacctaaggggcgacaggaggcctagcaaagggtgggaagacaattgtcataattagatgtcgtcttctagattgctctttttgctagccagccttggtttttcaatttgtattaacttccttatttcaatttcataatacttcttatgtgatttgcatagaacatgtaggtactactaattagctaactgccagctatatattctttaagatatatattttttccggctgaaatatgtatattcaactctcacatccctgaaggagaccgaaaactcaagtgtcgcaggcactgcctcgcgtcaatctataacgaacgtatggggatatcacgctgccaagtacatagcaaagaaaaatcacaaaagccactcttctattcctcctattcctccaattgctccaattcctcccagccatcttcactcataagctgttccttcacccgttctctcaatccctcgatctggctccctagcgcctcagtccactgaccctcaacggtagcaaccttatccttaagatccgtagtcagagccagctcttcatcagcactcgtctcctgcatttccctcctcacatcttcctccgcctccccacgcttaatccgctgcgcctccaccagcttctgattagcccgcataacagcagaccgcacctcatgcaacagacacagcagattcgtctgcgactcaatgaactggtagctcgatttctctgcatgcgacagcagcgtatacagatactgcagcgggtgctcatggtagctcgggttttcctcgtattcgtctgcgggaatctgcacccggaagccgtgcaggtcctcgggcgcctgctgcacgagagcgaggagggacggggcgatatcccagaatgcggagagctgcacctcgacacctcgcatgacgttctgctcgatgacgtccaggaaggtctcgagccgagttagcgcctcggtttcgtactggacgcggcggtcgagtgcgtcctgcgtgaagaaggcttgcgtctcccggagcttgtcttcgtttttggtctgcttgtaggggagtaacgcgacggctttgtatttgtcgtcgcggtcgctgattaggtcgaaggactcgcggtggagctgctcgcgggcttcgaagagccattttaattgcgttagtttttcgaggagctcgggcttctcgtcgccttcttcctgtgtttgatctggtgtcccgctttgtgcatcgtcggagagcatgctactcagctggtcgatgcaggttgtggctctgttgattctgtcgacgagaatggcgtgcatcggcttgagtactgtttcttggtacgtgtctagctggcgtttgaccattatcctttctcgctcgttttcttcggcaatcattgctgcctcggcctcggctgcttccgcaaaggtgagactgccttcttggatctggctttggatgttcgatctgaagtggcgatggccctcgtcgacttgttgttggtgttcttgaagcattcgctccacgtcggccttatatcgatgtctggtggttttgatctccgcgagatcagtaattgaccggacggtagttcggtgagtaaccaaatcaggatggctgttattcacagcaggatggtggcggggataaggcggaggcagagtaatcaaccgcgagatatctaaattgcggctttcttcgcgatacccagtctcgatggaattcctgggagaatcttcaggccagctgactttctcaggcggatactcatcagagccatactccgtagtcgcataattcatgctcacatctttgggctgagaaggagtcaactcctggtcccctagcatggcctcccgaggcaatcccatgtacttcgattcccgcttggatcgttgaacccgcctctcacccccctcgccgctggaaccggttgctgattcccaccagcgacttggtgcacggcctcgggagctctcctcgttgctcatgttaaggctggcaatcggcgacaggcaaggctgatagttattccaccacgcagactccggccgacctgctcggttttgtgggatatcaagctttggctggggcttgggcttgggctttggtggttgcttgactggcaattcgaaaagattgcggcgcacatcctccacttggaaagattcccagaccttggcgtatcgctgacgccggatctgagattcggcgagcatgtagtccgcaaatattttcagtgcttcagtatcatcctcggcactggcttctttatcaataaagatcttgtgcctttgaatcgcatcctgcaggaaagcaggatcttgtctaaggatcgattccattgacacctgcgtcgtttgctgtcctggcgttcggcgtggcgataggggtttcattatcgatacggcatcgttaggcatatggagaatatgagagattggacggtcttccggtccccgggatggtgcacgggagcgtgagcgtggccggacctccttcgctgaattgagagggggagtcggtagtgcctttggtggtaccgcttgggtggcttctttgggatatgttgacgagcccagcccatttggatttggcgagaatggaggcgtatgtgcaaatgcagtcgagggaccagcagagctaggtagttgtctgggagtcgtgtagggtgattgttctgtaacgacagcactggacgatgctcgaggccgcgtggcaatatgttgtccttctgatttaatgctgcgggtacttccaggggtttgattgtactttcccgacgtcggatgccgatcttgacctggactactggtctgttctggtagaatcaggtttgacggtttgatttgctcgagagcatcggcccaaggattaccatttgacgataccgcacttgggggttcaacgacctgactttgccggttacgtcgttcaattcgcctttcacggatgcccttcgcactcggatcgcggactgctgggctgcggaaaagaccgccactaccgggagttctttgattcgatgaatcgtggggatctccatctgtcggctctggtgccttggccgcttttgccgtgtcaacatataaattctcggttggtcgactgttcaaatatccctcgtctatccagtcagctggtgtaggagggatgcttcccagtcctgttcctagcacgggaggtccccttcttgtcgtcctgttcgagctctggggcgttctcagagatgattctgatgagccactcacgctgacggaccttgcagcgggaggaggccctggaggtggcggtggaagtggcatcccgggctcccatgtactatttgacggcgatcggtttcgcgactgactcgttgcccttgatgatcccgcactgcttaccacagccccagcagatgcggctcttcgggatccaggggcacgcgacggtgtctcaaagtgagcaggtgttagaggcatttgttcgttaaagccgggtgacggttggccctggtcatactgtgcgagccgaggcctgagactagctgcagcattatattgcgtttggtcattatagggcatgccatggtactccactcgaccttgagaaacagatctactcgctggatgtccctgcgggggaggtggaggaggtagcgactggcgctgagaccccaagtcagacgagtaagccatagatagcggccggggccggtttgagcgtctttgatactggacaggcatatcaaacccacccgccctgttgtccggtggagaaggcgttccggcaaagttagaatttggctgaccagaaaagtccggggacgttcgattttggttgctggggggtgagtatggcggaggaggtggagacagcggcacatctaccaaagtatcaatatcacttcaaacgggtcatgggataccactggtctgcagaggcatgagctgtgagcgagactcacccggattatttctttgcggcgtcacacgatgcatagcgcctggctgaagatacggggcctgcgactggggcctgcccggaggaccccagtcctggggattataaggaacattgtatgcgttcctagacgccatggaagacaatgaaaccgatctgctgttaacaggcgatggaacagcaggcgatagactgtgcgtaaacgggctcgaaagcgaggttgacgatgaaggcgtcggtgttagtccaagaccctggtattgagggccgctcaatgctgttgtcaacaatggcggctgtacagcatgctctcggcgaggtgacggctgattgctaggactcgcagctgtcgacgaccagccggggtaatggttgctcagcggctgctcgacacctgcatgattcggacccagccagctagagagggaggatcagtatatagaaatacccgagaataagatgggtcgcacctattcatattgggctgtgcatccatttaggaggcccgttccgaagccatggccgcctggaatgaaagaggataagccaacaaaacagaggaaaagctatcagcttgaaacaggcgagacgctaaatttttctattctttgcaactgcggagagcaaggttaggggaaacgatagcctagcctatacggaggcgtgctccgtacggcagagtctgaaggaccatacgatgtacgggaaatgagatctaaatttggaacggaagaaagaagaactcgatcgagaacaaatgagcgcaggaggaagcgggggattgttatgcacctgagggcattctcatcacattcgcggcccaagctcagcgcttatcgttctccatgagaggcccaacgacggtgtccccgcaataaaacaacaaaaagggcagggaatatctataaaaagatcatagtttcatacattttaagtagggatcagaggtttctcgaattcttattggtattttccattaaactcccaactaatgcagccttccataaaggaagaccaggatattatcatctgtcatgtgccgaggcaccaggagactgctccgatatcttcgaattgttctgaaaatcgatattagtgtcaagactaacaagcgatagcaagaaacataatgtgtttggacaaatttcagataaagccttgtcacaggcgatggtcgtcaatattaaatccttacgttgaccgtcgtgataaattgaagtgaatcatcataaaaggatgagggaagaaagagaaagaaagaggtcaaaactcacagaaagaaggcaaagcagaccgccattggcgtctgcaattattagttcgctaaattgtttctgttcgagatccatcagcgtcgagtactgaatggacattgcagcaatgttgagactcgtgaattgatcaggcatgacagtttctcgtcttcgccagcaagctgacttggacatatgcttgtcttttatgtcgtttcatcatgtaaagtcgggaagggaaggagacaaggtgtacatacacccacagtcagtcgagacaagagagctcttcgtagttcaaggagaatatctgtcttcaaaggatcattagcactagccaaggagatttgatgagtgaaattttgtgtaggaatgaatgtcagaaaggcatgaatggttattaaaaagattgtgtcagcatcgaaaactcgaatcagactcgtcatctaaagggtatcatcatagaaggtagggcagcaagaacaacaagactcagtcgcataccttctacagttacagttggatctcaatcgggcacaatcaaaaaggcttctattcaaagggttagtgactgtgtcacgcaaccgtctcacgagtcgatgaatatatggtatgtctcagtgggcgaggttttctaggcctgccgcaaaaaggcgtctccaatcatgaccggacatttttttaaacgccgtcggagcccagtgccgtttcatcttcggacagagagtcgtgtaggaaagatgctttagtcttaccatttgagccagtagcgcagtaacctataagtcttcggaacattagcttatggtctgaaaagaattttcatgcaaatgttgagacaaggtaaagatcagaaatagccatttgtatcatcaccgacccgaaggtctgagacggtaatttccagcgtattttcatacacatcgcgttcatcatgatataggggaagggtagggtaaagagaccagggtaactcaccatctgcgcttgttgtgggtgtgatatctgcaaccgataagatgtatttactatcatttctggaaaggcaagttagctcagtccaactcaaggtttgtgtgatagttcaaagcaatgatgtgagatcagcctgacgtgcaataacataagtttcattccccggagggtcaaagactctagtttgtatttggttaaaggtatcatcatgttgaaaggtgcatagatgtgttagggatgaggacaaaatcttaccatcgttgcagatcctgtcgggcggctattggttagtgggaaacacattgtgtcaaagattatggttggctcaatgccagacatcaatcgacctcagtctccgtgtgcattgggatcattaaccatgctgaagatgagggtaggatgatgaaggagaaaaaagtgaaaacagaaatttgtacttttttcaagctctgacggcgcggaatcaccttcagccggacctagcctatattgggactagccttgacataggcgagttctgcttatgtcacccaccccaacggcctgccgacttgggaataatctagcattggagacagctacaacatacaatatacaacatataaaaaaggaaaagccaaaaaattatcataatctattgttttacagctgccagcataataaacatctatgcatgggatcgcctcttttcgcgggcccagaactgatatagaacagctagcatagctagcatgcacacatcaagggcaatagtccagttatatccaataaggtaccttggagcatcaacagtcttccatacactagataagaaatagattagtataaagttcaggatcagcaggttgcaccaacactcacaagagcggaatccaagccccaaaggtattaccaatagtattcatggcactgatgacaatagcacgctcctcggcactatgggcacagatctcatttgcccaggcatagataatagctgcaatcccatccgccgtgcctgacaggaagaacgcaaagaacttcagtccaatagggacattccagatcgctagcacaatacaagcaaagatattcagcaaagcagtggcagcaatcaagctagctttcgcatcgtacacatcagagagaactccacagatcacagatgccacaatagtgaccgccggcgagactgtcgtgatcgtgttgatgctctcgaccgagtatccctcctccttgagccagattggcaagccgctgttcgaggatacaccatcggcctgcgagaagaagaatgcaaatccgactagaacccacagccgccagcctttcaggatctggagaaccctcgacttggtgaatggttgacgggcttcgcggttctcggatgccatgcgctcttgcgcgaggcggacttcgtcggcgctgaggaaacgcgagttgcatttgtctggtgtgctggggaggaggcataggcctaggaaggcgataggaattgtgcatgcaaagcctgatatcattagtctgtgtctcttttgttccttccttttgcgagacacttcggatacactcacaaattatgtatagccatctccacccttcaatcccgtaccgaccgtcaagcctggcataagctcccgcttgaatgtatcccgaactcatgctgccgacttgggaggcaatgaaaaagattgcgcctcggcgggacagttctgagcgcttataccaactgcccaggtaccattgcacggcagggaagaagaagcccccgagggcaccaacgaaaaagcggagagcgtagagctgggtgacattgctagccttgtactgtgccagagtgaagacaccccagaatagatcggcggcaggcaggaaatagttcacgggacagcgagtcatctataaaagacagtcagtaaattattgtctccatggggtagattctaagtgacaacgaaccaacaaagtcaaaggaatctgcatcgtgatgaacccaaccctataccaagtcagcatcaaacctcaattcacactccccgccaccaccaacccatcgtataaacatacatgtaaaccgtctgtagataatttaattggttcccataaagcttcaaatcctccttcatgccagatacataggctgtactcgtggccgatgaatccaagaccttagcccagtacgccaggaagacgaagacgatgatcaatccatcgagcttgaggatcagccgccgctcggcaggggtatccgtcggcgcaaaccactcataccatttctggcgtgcaggctcagaaccggacggatgctctgttttcgtggggttttcctcggctcccattgtctgcggggctttctcaatgggtagagaagacatggttgggtatttacctctaggctatgtatctccttgtgataacaacgctagcctctggggtatagggatacgacaccgccgatcagatatctgaattcgcttcatttttttccccttgggtgctttgagctgttatagggctgaaacggagcacgccatcggccgctagaatgaggagtcaatcaaattcgccggtaaatttttgacgctatcgccagaaattgcatcaagcaatgccaagctccgttctgattcgttggggccttggggtttgacccggggaaaatccatggataagtgttgagatggtcaagttttgcacttgaagaaggccggtattgctgtgggcctgggctgttgtggaattagtcaaggattatactcgtagatatcaaatcgagtaagcgtgttagctagcgttggaactatgcaggtgtagatgttgtgtgggaccagatctggtggcgtacccatctctgcacggaggtactccgttgatagcactagagaacaatatgatttaagattttattttatttttaatcccaacttgtgcaggtataactatcgtaaagcgctgaaaagaacaagactgcaacgaggcagaggtcgggaaaccaaaatgtaaaatccgaccaaaatcatcatgtccaagaatgaggtaggaataactagtgttaagaggatatatgcagggagaaaccagcatcctgaaagaaggaaagaacgtctcagcgagacgcttatttcttgtacttgttgtacatatcaatgaccttctggacctcattcttggagccaaggaagacaccactcttatcgtggattgtctcaggaacaacctccatcaaccgctccatgcgcgagttgacagcaaggccgcctgcattttcgaagaccatagccatgggcgcacactcgtacaggatacgaagcttgcccttggggctcttcgagtcggccgggtaggcgaagataccgccgtatagcaaagtgcggtaagcatcggcgaccatgctaccaatgtaacgggcgctgtaaggcttgccaccgtcttcgggatacttgaggctatggaagtaggcgttgcaccactcgtcccagtacttgctgttgccctcgttgacggagtagatggagcgcgactcgggcagtctcatgttggggtgggtgaggatgaactcgccgagggagttctcgagcgtgaagccgttaacaccgccaccgcgcatcgtaatcaccagctgcgctgaggcgccgtacatggtaaagccggacgccaccaggctagtacccgggtgaagcaggtcctctgggccgacggtcttgttgggacccaggagctcgtcgggaagctggaagacaccaaagatggtgccgacagacacaccggcgtccaagttggaggaaccgtcgatggggtcgcagacaacggcgtagcgagcatcggggtgctcgtcgaacctgatcacttcctcttcttcttctgagacgataatgcggcacttgccggagccacgcatggcagagatgaagatgtcattgccgatcacgtccagcttcttctggtcatcaccggttatgttcgaggaaccagcgagtccggtaaggttgatcaaggaagcacgacgaatgtagtaggcaattgacttgaaggagaattggagggcatggcacaggagtgtgaaatctccagaagcttctgggtacttgatctgttcttctgtgaagaatcgagaaagtgtgacaatatcagtgttgatgttctccgctccaacaggtgctgaagccattttggggtattgtttggaggatataggatatagagattaaaaagcgtagcaattgggtttcaggtgaagagtagcttaagtagcaggcgtgtggcaatcttgaaacaaggcagacaaggtaggagaagcagtttaacgtcagtgagcgggggggaattaaaccgggtagaagtatggggagtgacctcagtcccgttttcgtcatttgccccgcgtgacctgcccgggccctcgtccttcgcccctcgcccggttttccccctccctcgccgggaacgcccgtctcttaagtatggagcttcctatcaaaaatcactattattggtgatcgctgcacggattggaccttgtagcgataaacccctacctccctcccaaattagcttcacacccatacaaatatgtccaagctaatctgagatgtgctgcccaatgatctagatcctcccggtctgtcccttggccgactcggcctcgggatcagcagcggaagaagaaatccctataccccacccacagtcatgcgcacgtgaaaagatcctgagatttaggtaatgccattgttgtgcccaattaaagggggatatctacgctatggcgatagttcggtgtggatatatgtggcatagatcggtacaatatagataatgtataattctagaccctttacaatacaaaaaaagaaacacggagtgagacaatcccgtgttgtagaaataagaacgaatagactagtccacggggtcctcctccaacagggtcttgaagctgaaaggcaggaaaggaataccctcaccaacgaaatgcttactcattgcctcaacccagtgaagacggagcgagtgcaacatggcactggtaccttccatcacacacagaatgcaaatcgtcagcacaaaccagaggtagaagctgacaacaatcatgatcacacgggtcacggggttctcctggtcaaaggcaccaccaatggtcatggtccagagaacgatcgaaagttgctggtgggcaagcgacagagcccacaaacgaaggtaagaagcagtgtgagagatacagttgaggcagaattcgatggtgtggatgacttggtggatcatgatgtcgccaaagtcgaactcctcatgctcttcgctttcatcgatgtcctgagaaagcatggccacgccttctccgtcgctagccacactgtcacgacccagcccgccgtccaagtcaccatcggcgtccagtgcgctcaccctggagttctcgccgaggccgcggtaacccaaggcacgagcgcggttgtgttcgtagcggagccagagaggcttgaggaagagcatcacaggtacctgggccacagcgacgaggagcagaagaacctggaccatactctggccaggatagagttgttcatccaccgtaccagggctgaggaacatgaaaatgagcatgttgaggagaccgggagggttcacacccttctcctgccagttcacggtccacttatagagtatagtgaggacaagataaccaaagattgactggaagaagagcaatccaggaacaaaatttccccagatgtcaaccttagatctgaagtaacgtccattgacgtattgcaagcaaagggcataggtcatgtggcaccatccaaggagaacgctcatcttcatcttcatactattcgaaaatagcaaggagttgtctgcttcgtgccagttccagtccagtccaattggaaagcgatagccttctctcaatgttgcctcgaccattttgccgggcttgatgtcctcgggccattcccactgactggggaagaaggtgaaagatttggagaaaatatcgttgtaaataaaaccggtgtagatcgagaacagacccatcatcaacataatataccgtccatagaatgccatgtatgtcagttcatccagtttagtccgcgccagcttcttttcccagaaaatcatagcagaagcggctagagtcatcagtgcaccgtgaccgcaatcaccaaacatgactgcgaacaagaagggaaaggtgacgaccgtgtacaggccaggattgacttccgaatacttagggataccgtaagcattcacgattgtttggaacccttcggtgaacttgttcgtcctgacaaaagtcggaggggtcttgtttgttcggatctggttgacgattgtaggaacagtgaggcccgcgcggtcgttcacgtcctggagggtcgacttgatcagagcaagagagtttgtcgggcaccacgcctcggcaatgagcgtcttccgcgcttggtcgtatgagaatttgttcaaggtatcataaacggccttctccttcttgacaatgatcatccaggcggcgagcgagcgagcaatttgggaaagttccgcatcaagggtgttcttggtgttacggagcacattgccaacatcgccgagacgggtgttgacttcgtgaatctggtccctcctcaactcactgttctcatcgacaccgtacaaggaggcgttgagcgactccgagattttgcggatcttagcaagaatgttcttgccatgagcgaagatgacgaaaacattcttgtggacttcctcgttcgtcattgggtcgataatgggctctggaatctcggactggttcatgtagagatttccgcgcagggtacgccagaggatacgctcaaaggctccgatgcgatcccggggaataacaccagccacgaatccaatgttcatttccgagaagctctgctgaccctgagtgtctccattttgatgaggggcgtgatgctcgatatcacggagcagaggagcttcatcgttgtccaaggactgacgaatgtcttctgtttgtgtatgggcctattcagttagccttgtctatcaacggtatactcgaggcaacttacccgatcgaaaaatccaccggcctctctaagtacccatcgccattcgctcagctcgacttcacgtttcttcaaagtctcatagctatcgttcagagagataatccgctgttcaaggctctcactgcgatcagccaactcatcgatctccgacgctaagggggcggccaatgtatcggagaaatccgtggaagatctcatagggattgcggccttttccgtctgttggtggaaatagcggagctgtctttcgacattgtccaggcggcggatttcttttgtaaaggttctttggaaagcgttcgtgtccgggttgagctaggaagacgttagcgggagtatcaaagcaaagcgctcttcgtcacttacatctcggaactgaacctggccaacttcacccaatgcactgacaacttctcttccgatctcgttggcaatatagagctgggtcaagctcatatccgccgagcggaagaaggtgtcccgtggaaccatggtgtaatgaggctaccaggagccgtgtctttgggaagaagacagggaaaagtaagaggcaaagagcgacagtaatagatagattcaatgagaggcacagatcctcggctctgttgttgcgaatagtccgggctctacttgcactcgttctcgggtggctctgtcaagctggctgcatccagccacgtgatttagtttgcacgtgatctcataggacgactaaactaaacaaaatgtctacaatatggccaacctacaaatagtaactaaattcctttaaactgctcctgggtagatgaactgatggcttattatcatgcttcgtctttcttccattctaggagtctgaatcagcaggggatctgtcctaatcacctatcggtgaataagagctgcttgccctaaccgatcatagttgaggaacgagtatgccatctcatactgcaaattattggtagtacgatttattgggacccgtatatactgacacagtgctatcggaacaagctgatgctttctatctatgttgtttttctataatccttcgatcgagtccctagttgacgtttccacttgttaggattaacgactttctcatgtcaaaaggttacaaagtcatctaggagatcttttaatcgaatgttgaagtactcgattccctaacatgttgaataatttcccactatgtcacccccagtgacggttcatgtttagaaagtatggttaactacccagaccttcgagcgtcagaataccaccgaatgagtcgatattccacctatcctactacctgttgggcttttccaactcaaaaagtgcaaccacatcaccttcaatcgactgctcgcggtagatactaaacccagtcctctgcagcaccttcacactgccaacattcgctctattgcacgccgcaaacagcttctcctttttcaaatccgatccagccccgtcgaaatctatcctgtcaagcttccaccacacatctacaataccagcaacggcctcagtggcatagcccttgccccagaagtcaggatggatattataccccactgacggggctggactaagagcattgattcccgctcctccaataaccgtctgtgacgagtccttggaacggataatggcgaagaagaacttccgcccaatggcacctgatgcatccggggttgtaaatgtctttttggtaatgagggcctctgactctgatatgtctttgtggggtactttgggccagctacagatatagtcacaagtcagtacataactctcccgggttgtcgtggtggttgttctttgggtataatcttacagccagtccgctacgtcttgtcgtcggcggatctcaaaaatggccgtggcgtcagctaccgtcaatggtcgtagatacaggcgacttgtgtggatgggtctcaaatcggccgggacgatcacggatgtagcttgatcggggtagaagctcatgttgacggaatatgcgatgttcttagaagctgattcttgttgggtatagaaactacagttatatatattctgcgtgagtcattcgcggggctggctggtcaggctggtctacaacaatatcccataccagcgatatatacaacacataatagagatgcaatacaacaggacagcgaatacattttgaacagacctcacagaaatatattgctgtctagcttcgaccaccacgccgggatagcgcatcttaatgctttcgaagctccgatatacagtgccgcctcaccaattcagaagcccagaaattcaaatcaaaacagtttgaaattaatcatttacactcataatatatagtcggtggaaaaacgaaaagccaaccccatcgtcacggatagacagcagctcccatagagcggagtcgacgagcacacagaatgtacagccacagatcagcttcgacttaggcaccgccatccctcttcgcgtattcatcctccatccgctcctcgtacaggcgatcggcctcctccttggtcagagagcgaccactatcagcattctgcgacgggctggctgagtttccaggcgcggtcccgaaatagctgttgttgttgatgtggtcaggggcagtgtgtgaagcggagctaggaggttgtgtgcagttggcttggctttgttgcttgtcaaagagatcggcagtggggacgggcatcttggttcaggttgagtgtttaagtcgcgagtgcggcagtgatttcgaggaaaacagattttcaaggaagtaagtgaggatggtagactaggactcgagctgttgcgatttttggcttcggtaggatttcatgctggttttatgctggctggcaagagttgatctggggtcgccacagatgtggcgacgccactgtgagtcagacgtcatgtcaacaaaacgcagctgagaagtgagatttcagcagtttacggttggtaggggaactggggattggagattggacgctggagactggatgctagacactggacataaagtaccgtagaatgaagacgagatgaatatgccatcatttaattactgatcgcgataagcaacaggccgttgttgatgcgtgccgagggacgtggggacttggcgcaacggtcgcaccagcgcaagggtattccaagggacaaagttacaattacaagaaaatgaataattgccattagagcttattactatgatctacgaattacatctcttctccaaactcgagccactggctcaaggttgatgaaaagagttccacgaaggagagtgccaaagaatgcgcctgtcaatgaccacgagagccattgaacaaactgttccaccacgatgtgcaatgcagggaccaatctgtggtgacacgtcttattgatcacggtcacccaaacaaggtaagtatgaagaagaaagaaaaaaagaggaactggactgggaaaacgcggatatatataccctagctggaaagcggtggcagattcccagattcgccacctcacactgattggtcagcaaccgaagcaaatatgagcacgtgacactgccaaggcccaaccgcatgtgatatgactcatccacctccctttctggacattacagacctgtcaggtcagggcgaggaatgacgctacggagtatgtacagtgcaacgtgcaggacacaggtaccatgcatttctttcctaggtttcatgcttgcgccagagtgagaatgaaatcatgaaccatgaaccaacacacagacctcaaacatgaatcaataattgaaacctccttgttcgagacgcctcaaaaacaagccagactccatacccgacccgagcttgtgtggatcctcccctatcccacaactttgtattgtggctctcacgtcccgtactactcaaaagtccgaaagacgtttggatcacaacttgtttggaatacggtctgtcggaagtatacccttattcagagggttctacaagattaactcgggtgaggaacccacagttaatatcgaatagcaagtaaacgcccatccttatcagagtgtgccatggtttgagtcgatctagtggacgctagagtcgtcggggcttaaatggacgggaaatctgtcccttgtgtacaccgcaggtcaagctggcgcttggcgggaagtattacgattaatttactcggtaatgagctcgggagatatattctgttcatgaaagtagagtcttgctgtggtactatattttagtttttttttcctgctcgaaacctatagttacatgcatcatgtacggtgcaaatgtaagtccctggaacaatcacaactacaacgagtaatatggagccatatgtactccgtattccgtatatgcatcccgaaaaagcgggaaagaatccataggcgcccgggttccgctatgcatggcacttgcatggtgtcaaaatatagcccaacaacaagagaggagcaaagatcgacaagctgacttggaacaatgatgtgatcgtcgacgagcggtaaacgccgaccattcatgggatgcagcaggaggagggttgagcctaggacctcgcgaccgcaaaaaaagggcgaaaacggtaggcttggtacggacatgactggtgcttagtcgccctagaggtctaacgggtgcaaaaggggggccatgatagggcatgatgagataccgagaagggggtggattcccccgtgcggctatcattactggaaatgtttcaatggccacattctggcagtgttgggctgcgacctgatagtgcttgtcctgaggtagttgtagatcataccacctacctccggagatataaggtggtgccataggacattgtacgagaagaacagcgtatgaaggcactttccgttctcctgcagacactatcttgtcgatgaaccgtggaaatgaggaaatgaaccgaataaagtgcttgatacctacactgagtttgtagggctggccccttattcgctaagactcgaaactagatgcgtagtccggtggagactactccgtacttcgtgttgtacgtacttttttgatatattatcaccactaagaaatctacggggaaaacatagggggatgtaaagggtgacagaaaaggggcttaattaggggcatattgtccaagcgtgtagatcgtgttttcagtttcaactatgttttcctgcaccataagagttactttgtactccgtatgctgtactccgtggattagcagtatgagacgatcctggtatggaatgatgcgcatatcacgtaaagaggcgacactttgtaaatgtgctgggattggctagacgaaaagatcatgggacctttcccgcagcgcggcgaagacagttgatacgccgatagggacgtacatcaaagccggagtcaagaaggaggggttgtatcactgctggttggttgtccacgaggattcgcacgccactacatcatagagttgatattcggtcatggggcctgagtaacgattggaagtcgtgatggccaaccattgtagaacctaaagatgagtgcatggcccggtagccaatacccggcctaagccatgtaaatgcgacaaagttcatctacatagacggcgcactaggctgatcatgacgaagcaaaatgacgggctgccttgcggtgatatggtgggggtgggcatggagtacagggatgcccctccaaagggatatattctagtgccgatatagcctttccgagggagaggcttgcaaggtcggatctacttttgactacggagtacggagtatgcggagtaatacagaagaaccatcgaaacatctagttgatttgacaatgaatggattcggtaattccaacggcaacgccccccttgaactgtgtaacggcgtagttgaacgatgtggaatgagcgccaacggtgtggcgacccaccgaagaatagaacctccttacgggccaggaagtcactaactaagtatacttttcttgtgtctgatgacctgacaatctaagataaccccgccatgacgatatatttttcttgtatactctatagaatatgaaacgaacagaagttgacttttaaatcggtaggagcatccgaagtacatggagtaataagcgagatgtgaccgttgattcaagctgcatggccgatcatggcctatggtgtgatggtttcatacagtgcaaggccaagaattgcagagttttctttctcctatttgctgtttagttcctaaatttagttggatcaggtctagcgtcacggacaaagaagctcgtgttatcgtaagtattcttagggcatagattggcacacttccaaggttgtccatggctgttccacttgcaaagttagttgcaaagcgtatttggcgttacacaggagactgatagagtgcaaaaacagaatggaattaaaaaaacatgtcaaaagggtaatgagaatgacaaaatacagcatccatggatgaaaaagacatggcccgtaaaaacagaacgcaaataacggaaaatgacaaaaagaaaccaaaaaaacaaaaaaacaaaaaacaaaaaaaaccaattaacccctgaagcgccattagctaatctttttgtgggtcccctgagctctgggctccctgcaggtcctttccttttcagggaggacgccatcaacaaccctctgactcttttttttcccttttcctcttctctctcttctctcttcttcctcccacaaagcaaaatacccttacttcgtgatacccgagctattgtgctctaatttcttttgctttcttttgagataccctatacccaacacgcctattttacccctacgaagcccagcttctttaatacccgtttattattttaatcatgtctgaagtccagaagactgttgaggagaccccggtcgtccctaccgttgaacccgccgttgagactcctgccaccgaggcagcggtcgaagctcccaaggagaccactgaggaacccacagccactcccgccattgagagcaccgaggcttcggagcccgccaaggaggaggtgaagcccgctagcgagggcgttctcggccacaaaggccccggtctggtcaagtaagttgcgactgagatcacaactgcgacacggagactgacaagtgttcttcgtttcttttaggggcttccgcttcgtcaagcgcttcttctacttcaacgaggaggccactgagagcaagcacctctccgtcttccaccagaacgagaagtcctccgtcgccaaccccatcgccgcctgggccacccagaccggcaagggtctgcttttcttcaccaagcgcgctgaggacaaggccacccccgctggcattttcaacctcgtgagtgctttggcaactgtgatgtgatgcggcaaactctaacaatgaataggccgatgtctctgacgtgaccaaggagggtacacacgagttcctcttcaaggttggtggccacaagcacaccttccaggccgccaacaccgccgagcgtgacagctgggttgtcgctatcgaggctcaggccaccgaagccaaggccgagaaggagaccatcatctccagcgagggctacaaggctgagctcgagaagctgaccaagcctgccgttgtcattgctgccgccaagaagaccgaggaggagacccccgctgtggctggtgaggctgcccaggaggagcccaaggaggagaagaaggagaaggccaccaagagccgctcccagtctcgcaagcgcgccagcatcttcggttcgctcctgcccaagaaggaggccgaggagaagaaggaggagactcccgctggtgaagagaccaaggccgccgagcctaccgctgagccctctgttgaggctcctgctcccgtcgttgccgagacctctgagactgctgctgccccaactgaggtcgctgagcctactgctgagacccctgctgagactaccgaatctgccaaggaggagaagaaggccgaggacaagaaggctgagaagaaggccaagcgtgcttccatcttcggtaacttcttccagaaggtcaccagcccttcccaggagaagtccgagaaggaggctaactccttccctaccgaggagactcccgtcgctagcactgctcctcagctcgagcaccccgtcgaggaggccgctgccacccccgaggccgaggcctcgactacccccgctgaggctgtggagacccctactattgaggctcccgccgccgagcctgtccccacccccaaggagaagcgccgcacttccttcttcggcaaccttggcatcaagaaggagaagaaggactcctccgacaacgagctcaccgatggtgaggccaaggagagcaagcccaagaagctcggcagtcttttccgcaagcccagcaaggctgtcaagcttgacaaggaggaggctactgccactgagactgaggccaaggctgacgccgctgaggaggcccctgccgtccctgccaaggagactgaaattcaggaggcccccaagcccgtcgagaccgctgaggactccaagaatgtcaacgttgccgtctccacccctgttcaggctgccgcatgagatgcgactcggagtcctgtggagtttgaacggtggtgggacgtgtcctatccgccgcccgcccgcgatatacctgacgggctgattcagtcttgaaggtgcaactctgataccacttgctccaattgttttgcttttccctcgccactgtcgttatcttcggtccacggcccccgtttgtgtttgggcctggatctgagatgacgacaatgagatacccgctgtcgctttttttctttgattttctctaaaataataccatcggcgtcaacgacgcccccagactttggactgcggctcattcctttacgacctgcgtcccgcgattgtgactctgttcgcgacgcgactatgtgttacgtggtttgtcgtccgactagattgataccactctgccttttcttttttggttacttgcttttgtgtttgataccctgtggggaggatgggtgctctttttgcttgttgcttgagctttggatctagtctgtcgacttgtttctccctgcaacccaaattggccctgtaatgttgtctaccgttgttgtcccgaacggctggtttatattccgccgtataggtggcataccttgcgataggtaatacttaatagaatctctcaattttgctttacatcgtcatcgtattgtagttttgagcttggtcgttacgtggcgcaggcgataatccttgctgccaggctagtagttgtaatctctagcagcttatgcatatgatactgggaactccctcttagacatacttgtctcctacctcccatgtacctatttctcgatggtctcgtataaccgcaaagtgggtttgttcgttgtatttgctatgctaccccccttctattaatactgatgcggagacccagcactccctttccgcatcgtttaaaaaaaagtgtcatcgcaggctttatctttacgacatgcactgattcaatgccgaacctcttagagtgtatcatgtcgttcaatcccgggtaagacatcgtggccctaataatacagccacctgaatatcctcatccccgttcaaatgctcctcgggctcttcctctggggcatcacgttcggctaccgcgggctcgatgacaacacatggtctccaccaatccctgagtaaccaagatcatcccggtttcagtggaggcatcggcttccatgcgttccaagtggctgttcagagaacgttgagtgtggcagatgtcaacctgggattggggtcgtgttagttgggcagagtaactatagatatattcacgaatcggtcgtggatgaccttgccttccgcattgaaagcaccaagcattagatctaaactatccatagtcgtaggaatatccatttctacacctagaaaagacccacctgggaaaaagaaaaaatcgggtccataccgttgcatatgtatatgcaagcaatactcatagttgaggatctagcgacccatcgtgatgtcttggcagtctggggtgcagccttccatgttggtacttaaagaggttcattcaggaaaccaccattcgattattggatcaggcacggacgtactgtaatatatgcccgtgaatatccgtgagatcggcctctacacgagctcatatcgcggttacctacgtttaacatttgcaatatgatgcgatattgattgtagcaagatcgacagcagtctagacttgaaggtctactgttgactatgctagacaataatgacatgttcttttccagtgcatcgcacatgtctgcaaggtgcccggcgggctcctatttcggtaaagcctcgggccttggaggtacgtcggcattatcgcaggagaaacgaaaaatcaataaattgggtctgggttacgcagtgcaccgtattcgtattgactttaaagtatatcgatattctgttgagttattttttggaatcgagttttggacgagtatagaatgaagactggattagcatgctatagttatatctgagtactgcgtgtataatgttgtactgtactccgtctatatattctactccgtactccgagtctgcgacaatgaaattccggaaacaaatgttaaaagtcaatttcacgcccttcggcaagactaaggaaacgtgagcctctcataggacattggcgacggactcagcccaccggaacgagattgggaaaggatcggtggatccggtgcatttttctcattgccctcatggagaacgcctgtgtctccccgggtctacgtgcaacctcatacccaggtaccaaggaggaattgtgcggtgcctggatggaattgatttccaaagaagctcagaagcttggttgtgtgggttttgagagattttgggtgcaagaaaccaattgaggaaaaagcaagttaaattaaaaaagaaaatgcatgccttggaattccgggagggataggaatatgagcgctgattggtcaattcgaaaggaagcggagaggatcctggggacaggtacttggaagatacctgatttatgtatgcagatgcaggccaagtgcaggtaccatctgatgtactgcagtctcgatggatgcctgtccgatgtaaccaatcacacccacgcatgcaggctgtgactcacaccccgtgacttccaggactaagccccgtgcggctccggagcaccgattggtcagcaccagggcacacagcccttaagaagtgcctgagttccccctccccgtttgcctgatttttctctccctatacccgtctcttttttacacacatacacataaaccgccaaattgctgccacaccagaactatttacaacttcaccatcgccaaaatgggttcccaataagttccccgtctttcaccagccagtctatctcaactgaggcagacattatttctccatccggaaaccgccctttaatctcctctctacccccttcagagcctccttttggatctctgaactttagcatcgcgtcgcgtagctccagttctcccaacaaatttaccccgatcgacttaacgtcgttcaccacggattaccaccagcaaccatggcttccatcacccccacctccacagcccttggcttccaatcagaacaacaacaacagcaacaacaacagtgcactcgaggactttgtgctttatccatcagccacaccacacccgcagccccgcttgcgtgtgcctgtgaacacaacccatagaccttctgcactccagccattcttggcgcagaataacccccgacgacactctttcagtctgcagttgcaccgacatctccagcagcagttctctggttcacctgtcccagaccccagagtgacccagcttgcccggtccccctcttattggtcccgtcctacgttcacgcaccaccgttctaatacggcttctgtgccttccgattctccaaacaccaaccgcccacccatcccgctttttaacggtcaaaaccaaaacacgccaacatatcgacgtgtcatgtccacccctaacttcatggaaggtaattcattcatgtcgccctgtgatagcgagtatatcgctaactttatgaaagctaacgaggttgacctgtttggtctcccctcgggcgacttcgccgctggcatggattcagctctttcattcaacgatctcggcctggccaacttctcccctgaaggtcccccgggcactatctcgccgagggatctcatgatggatgcgtctgttcctccctccggtactttcaccgacctgagcactccctcgttcgagtcgcccggcaacttcagccaaaacacctcgcccatgttcaccgacatggatatcgctggccacgaagaatggccctctcttttcgaccactcgtcagacccactcaatgccttcgaccttgctaccttggatgtcgcagctgccttcactgaaccgaagaagccagccacgacgacaatctccatgtctcctgtctccccccgcgccaagcgatcggccgcatcctcgcctgttcccgcctccggtacagccaagcactccagcgtcgcaggtgtcaatgcgcgatcgcgtaagaacctgtcgcctgttgagttcgaccccaatgatcctattgctgctaagcgcgctcgtaacaccgaagcggcccgcaagtcgcgtgccaagaagatggagcgccagttcagctccgagcgccgcatcgaggatctccagaagatcatcgccgaacgcgacgcggagattgccaagcttaaggctcagctccagattcaaaatgcctaccagtaatggtgctcctttttctattcttggtcattcaaaatttgagacacgggtctttgcattatggccccctcggtgattctgacgattgtaacgattggacatttcgtcttcatgtttttgtttcgtttcgaccctctgggtattgtggtaggcgcgggtgatgggtaaagcctagccccgacgtctcaccgagatcagatgaacgcgatttgcttcgtcgcctctgattctctaaaagtttgagacaagttcctcagtcaatgtttctttttattttttccttctgatctgtgtttctcacttttgcgctctgctgcttcagcttacctacttcggtttttgattacttttgttaggccggttctgattgtctccctcttatgggattgactcgtggctctcttaatatgttatttgtctgtgtttgaatcaatcatcttgctctatctcttctacgtgtattgtaaactatcctagtagactaccccttccttctaaagactatttgtaactccctggtaccatatccttccctcatagatatacgaccgaacgataatctatctgcatctccctcaagtgaaagtgaaagtaatctagtccagctcagacttgcctttaaaatgcctcataaacacacccgatcccccaaccaccctccatctcataccacccgcactcacaacccttctcccatctccccctccctgtaccaaaaccctaaacagcactcctttcctccgcatctcgcccgcttccattcaacacgagcaacgcaccgtccggggactgctattgctctatgcgtgaacgaaagagggtgggagacacaggagatggggcgtttgaggttctggtgtgcagatgcgggtatttgagatgggtggatgggtgtgtctgtggatgtagtgtatggaaacgaaggacggttgttgggtgaggtaggtttcggaagtatctgattccatgttctgtcatcatagctggtggagggggtagggatagagatagagaaaaagatggagatggagatagagtagaggggggaaatgaaaggaagaaaagaaggatatctataatggaggatagaaagaaagagtaggtagatggatgatggatgtgtaggaagaagaagaagtggatacgcatgcgtaaagcacctcagaacgaaacaaacaagcagcagaaatccatccgccacaagtctccctcagctcaaagcatccgtacccctcgacctccccgtctccatcttcgccgtccgcgcgccaaactgaatagccctcttcttctcacgagaaaccttcaccaagcccagccgcagagcaaccagacgcagcgccagcttctcggcatcaataccagccgtagcctcgatttccgggagtccgaacccgcacttctcccacacaggagcccgcagcgtccaagccacgaactcttcgtctaggaatgggaagcgcgtttcgcggccccagtgcgagaggacgcggtcgtcgcggccgagattgcgcgacccgagtcgactgacgtcaagctcgatctcggcgattaggtctttgaagccgccgcggttgaaggccacgctgtgtcggccgtagccggcgaagagctcgtcggcgcctaggccggagaggaggacgcgnnnnnnnnnnnnnnnnnnnnnnnnnnnnnnnnnnnnnnnnnnnnnnnnnnnnnnnnnnnnnnnnnnnnnnnnnnnnnnnnnnnnnnnnnnnnnnnnnnnnnnnnnnnnnnnnnnnnnnnnnnnnnnnnnnnnnnnnnnnnnnnnnnnnnnnnnnnnnnnnnnnnnnnnnnnnnnnnnnnnnnnnnnnnnnnnnnnnnnnnnnnnnnnnnnnnnnnnnnnnnnnnnnnnnnnnnnnnnnnnnnnnnnnnnnnnnnnnnnnnnnnnnnnnnnnnnnnnnnnnnnnnnnnnnnnnnnnnnnnnnnnnnnnnnnnnnnnnnnnnnnnnnnnnnnnnnnnnnnnnnnnnnnnnnnnnnnnnnnnnnnnnnnnnnnnnnnnnnnnnnnnnnnnnnnnnnnnnnnnnnnnnnnnnnnnnnnnnnnnnnnnnnnnnnnnnnnnnnnnnnnnnnnnnnnnnnnnnnnnnnnnnnnnnnnnnnnnnnnnnnnnnnnnnnnnnnnnnnnnnnnnnnnnnnnnnnnnnnnnnnnnnnnnnnnnnnnnnnnnnnnnnnnnnnnnnnnnnnnnnnnnnnnnnnnnnnnnnnnnnnnnnnnnnnnnnnnnnnnnnnnnnnnnnnnnnnnnnnnnnnnnnnnnnnnnnnnnnnnnnnnnnnnnnnnnnttgagctgaggggtttgtttgggctgtgccttggccgcgggatgcgaagtacagggcgcatgcgatggacatgtccatttctgtgttgtggggtctcattaggcgcttgacttgctcccggtgtgcgagagtttctgtgtaggggatgtcgatggcgatgaagcgccatgtgcggcctggacaggttgcttggagctcgatgtgggcggaccggccggttatccggtctgggcagttttcatatattgagaggggcggggaggagggggatttttgttggttggcttttgcggcggctgccactcgcgggttttcgaatgctacattgaggaggtcgattggttcttcgagggggagaatgtcgtgagagagtctggcgagaagtgtgcagtctaaaccaccggagaagagaacggcggttttggccgtctggcctacaatgtagcctggaggctcggggatgttctgtattcttaattcgagggattgaagcagttttgactcgagttcctggacgaatactgagtctgttgtcaatgcaggaggctgctctgttggtaaggatgtattcataggtgggattgattttctcttggtctcttgtcagttgctgctcgcgggaagatatggtagacatacaatgtgaccagctggaagtgaagcagcagagctccatggcaaggtctcgattttgcacaactctctggcagataaagaaggatcttgatagcgagctaggtcaatcgtacaaacgccctcggtgcccacttccttgaagcaatccagcgatgcgctatcacaaatgctgcaaatcttcaaatttccattttcatcaaatccctcgaggagcgatcgcctcccaagacaatccctgctgtagaagagccttgagttgaccgcatcatagaagacaaaggcaaatggcccagagagacttgcaatggcttcagccattctctcaacaggatcattctgatcacccttcactgcctgtagaaataagttgaaaacgcgttcggtatcattgccttggacgcgctccccagcgatcttccaggcttctccgttccagcagagcacagactgggttgtggggtctacaagtggttgtgtgtacacatggtcacctctcaatgagagcactgtggatgtgaaggtgagataataggaaaggggcggagacactccatcctgtgcgttgatatctttttgcgccgtatgagttttgtaactgtctggtcctcgcttttggagcagagtgcaggtctcctgtgtcggtggtgtcgactttgacgagctcaatgaaaagaaaatcccacacatggcggagggacaggtgggagtgttgtttattctgagatggtcagcttgggctttttttggatatagaggtgcctgaggcattaaggcattagtcattatatccacccgccttgtcaccagcggatgcacttacgacggattggaagatgttgaactcgtagatggtttattactagatggtgtcttctaagaatgagttcgactctgaaatccgtgaaaggagatgggcatcatgcaagtacctatcttcgaaggtctggattacacaggctgagcaatgttagaactacatataggtatggagtagtaaatacatctcttgccgagtgagaaatccataatgatactgtgaagtcagcctccttaagataacccaaccatctgggcactcattcctctatacattattaatagacaccgcctgaatcgagaggcggactacctcggttgaatgatgatccgtacatcaatatgaggagccgcatgagcatacttggagtcttcatgaccccctgaatctattttttttgcccgggcgcatatgactaacatagcttatgtcggccacagaatccccgtcctctccgggtcccgatacgagagacgtcccccatatccatgaacacaccgaaacgccggccgctccaaccgaccgcctagctcaaacacaggacggtctcgtcagaccagacagcagtcaaatagtccaaatgagcgcgcaggaaacaacagaggcacaccccgcggctactccctccgatcccgccgcgatggacttgacgactgcccaaccaccacaggctgaggctgagcaacttgcggggcagctggaaggactgtcggtctccggagatgcgactccaaatctgtcatccagcgcaaatactcctccgccccctccgccccagaaagatgatgtctacctcaacctgacaagttctacgaccactgcgccaacgctgccatctatcgatccaaaccacacccccggccccgaaaaagagctcccagatgtgcctagtgacagtgacccggaatttaaacgagctggtcaggctgaaggacctcgggacgataatgcctcccagccagagattcaaagtatcatgggacaattccaggaccccgcgcagagcaccgaccaaaatgtgatcatgtcaccacggcttgagcttgctgagcaactgcgaagcggtccaacatatttcccgccacgtcaatccagtttggaccatgcggcttccaccgagtccgtgaccgctccggtcgctaccccggagaagcagcctgtatcccaacgtccgcagatgcccgaatcgccggtaccaaatcggagagcgtccacctcgacgatcctaccgctgccggaaccagagcctgaccaaccattcgattttcaccgcttcctagaacagctgcgacaccgcaccgccgaccccgtagccaagtttctgcggtcattccttatggagtttggcaagaagcaatggatggttcacgagcaagtcaagatcatcagcgatttcttgacgtttatcacaaataagatggccatgtgcgagatctggcgagatgtttcggatagcgagttcgacaatgccaaggaaggcatggagaaacttgttatgaatcgtctgtattcgcagactttcgccccagccattccatctccaccgacgatacccagaagcgcaagtcggacccgacggagagagctagagaggctccatgggccgtggcgacgtggccagcatcaggaggacgttgagcgagacgatatcctggctcagaagatacgcatttacagctgggtcaacgaaacacatctggacatcccgactgtgagcggtggtggacgccgtttcttgaatctggcacagcaaggtatgtactatgttctggagattttccaacttgacttttctgactttgcttgacagaaatatcaaaaatcaatggctaccgggctcctcgagacaaggtcatttgcattttaaactgctgcaaagtcatatttggtttattaaagaattccaaaaaggccgacacatctgccgactctttcatccccctcctgatctatgtggttttgcatgcaaaccctgatcatcttgtttctaacatccaatacattcttcgattccgcaaccaggataaactgggcggagaagcaggttattacatttcatcgttggtatgtttgacttccatactgccatagatatccaaactaacctctcctagtctggagccatccagttcatcgagactctcgaccgcacaagtttaacagtcagcgacgaggaattcgaacgcaacgtcgaagccgccgtgtccgctatcgcagaacaaaaccgggaatcagaaaccttcgaagagaagactcccactcaaccccctccatctcaaccccaggctggaccaagccgcaaagaaactactcaatccagtgacgaagacaccgccccagtcgcaggactactacgcactatccaaaaccccctcaccaccatcggccgcatcttctccgacgacggagattcaggctccgctcctcaagaacgtcctcagcctgtcccgacaccccaaccaggtgtcgctcctccccgtctcactccgaatgtctaccagccaccccgcgcaagcagcgaggaccgccgctcaggtgatgagcgcgcccgcggtagcggaacctctgcgaagaagaatctaagccgtgtgctcgacgctcaggatgctgccgcacgccaggctagtgctgaagatgcggaggcgcgtcgcatccaacgcgctgaacataataatgttgtcgagacactctcgaacatgtttcccaacctagatcatgatcttattgacgacgtcgttaagatgaaagagggaaggtgagtacttgaaaaggtttatactattggatctttactaactgttcctcgcagggttggtctagctgttgatgcttgtcttgctctaagcgcagagtagtatatagaataatgtagcatcttcgcctgttcggggataacatgtcaggaacagtctcaggggcaattctgtctctctcatctttgacttgaaataaatagccccagaggtgtatctttcttaaaaatataatatcgcctccttcgcccggcagaggtacatccaccaaccggaactatcaattattgcagctgctagactgaagtatctatttaattgaaataatatatttatatgcatctgtgtataagctgttaaaaagggatggtcatcggcagttgaacagggatgaatgcctcaaaccccagagatcctcggctcttccccgcaaaaccgcggtctctcgggattttagtgtaactcattctccttcaaagagtaacatattacaataattccgatttggaataaatacagtctcttcttctccctagaggcaacattgcacaccatgtcgtcccccttccgcatcattgagcatgtcgtgcccactcagcacattagggagtatcctggcgccacggccaacgaccaagaagagcccctatatctggccgtgaaacaatatattccactcgacaatcccaatccacaaccaggcgacattaccattcttggtgcccacgcgaatggcttccccaaggtatgagatacaagtgccgaggtccagacccgctttgggctgcgcgcatagcgatggccctggacgcatacaacctagaatcggcgatatactgatcatttctcgcaggaactatatgaaccgctttgggaggaaatctacgctcggtctaagcagaatgggatgcgcattcgcggtatctggatggccgacgtggcgcaagaaggccagagcagcgtgatcaatgaagactccctcggaaatgaccgtatgtgtatgagtatcttatgagaagcaattgatactaactatataacagctagttggtttgaccacccccgagacctcctccacttaatcaacgtcaagcgggctgaaatgccccggcctatcgttggcatagggcatagcatgggaggcgcccatctgtaagttccaccaaccatcacattcacacagcagctagctaacctactcctagagcacaactgtgcctaatgcacccccgactcatccacacactagtcctcctagacccagtgatccagcgccaaaccacgcaactagacaatctcagcctgcaaatcaacaagcgcgtgatcgccaaaactacccaactatcaacccaccggcgcgatctctggccctcccgccaagcagccgcagaaagcttccgccgcagccccttctaccaaacctgggacccacgagtgctatcccgctggatcgagtacggcctgcgcgacctcccaacagccatccacccactagaccccaagaccccgataaacaaaaccaccgggcccccagtaacactccgaactacactacaccaggaagtcttcaccttctcgcggccaaactacacgaacatccctaacagcaccaagcccgtcaaccgcgtcacacacccagacctagacgcaacccatgcacacagctaccccttctaccgaccagagccagcccgaatcttcgctcagattcctttcctgcgtcctagcgtgttgtacatcttcgccggcaagtcggacatgtgcgggcccgatatgcgcgccgataagctcgctaacaccggtaccggactgggaggcagtggcggcgtggctgcgggccgtgtgagtgaagtcttcctcgaggattttggtcatctccttgcccaggaggctgtgaatgagtgcgctgatgcggcggtttgttggcttgcgccggagatccgtcgctggcgggcggaagaggagagtttccgcgcggcttggagtcggaagtctaagattgagaaggttactgttgatgcggagtggttggagaatgttcctgcgccagcgcgtaggccgaaggcggtacagaatggggagtcgaagctataggtgaatgatttgttcgtagaagtataaaccatatatagtttgcttttagattattctacatctgaatatagaacggtcaaggctcgtctgagtgtttttctatttctttcaggccctatgaatgagttcgccgaatcaacgactataatagttcacaagcccgaccccgttctatagcaacgaccccgtgcgcccccaattaaaaaacaagagcaaaaggtatctctatggtccaagccaaaagatccgtctccgggacgaatggtgttcgcgaaagcaacgccaagaagattataaagaaaacagtgctctgctccgagtctcgcggcaaaggacagacaggagcgtggtatctattttatgtcgagggtcacatttgcaagagtgtggtatatcgccacccataaaaattgggtgcgagtaatgaaccaactgggagagagaatgtctcggcagctgtttcacgttgacttcttggctcgggctaccgcggattcggatggcacatccgaggtgcggaccacttcgggaatctgccagaagtgcacccagcgcaggtggtatttgtcttgttcgttgttgaggcagtggcggagccagattccccacgtgatatagagataagcaccgatgccagtcatgatatgcctgcaagtgagaatgaattagcaaacagaccatagcaattcatagtaggttgagcacataccaccaaccatgtccttccaataggagaccccatggaagaccaacagagcggcgataccgacggatctcagagcagtatatgttgtccaagccccagatgaagaaaccgcccaaaaacatgctcagtccatatatcaccatgaaccacatggtcttgagggtcttcatgtcgcgcacattctcgtagttctggcgctccttcgtcggaacgggaagtcccatcctctggcgtgctaggcggtcctcttccgtcgagtggcgccatctgggtcggagggttgtttccatagtgtgcatgctgcggaagacgacgacggtagtcaggcacgcgtatgcattctggtggaagactgggtcttggagatagtggtagtacagggtgatgaatacagcgagacctgtgagcgtaattccgagaaagactcgtacggtgttggtccgggagtacgagaatgaggcatatgccataaggcaagtggtatagatcatcgagagttcgtccactagctgcatagggtctgttgtggggttcaccggtcagtattgctcttgcgatcactcatatcgtttaagacatctttggtgggggcccgccgcccttgaccacatcttggggttagtgtgtaggaaacttacacttgagggtcgagtgaaacagaaagcttcctgtgccgactactaggtagccaacgagggcgaccgtgaagatttggtcatgtccattacgacggcagctgcgaatgccctggactccaagccacatgaacagcaaattcgtgagtgtattgacaatctccgcggcatagggggtagcataatagtcctgcgcaaagacatatatcagcctagttcttgcctctgcgcttcctcatggttggaaatacacacctcttcgcaccagttcaaggtggaagtgacaggctcccagtatccggcctttgcggtcggatacggaaagaagggcaaagaccaaggcatttatgctgtataccaaggtagtatagatgtcgactctgtaaggtctgtaaggtctgtaagccctataatgtcctcgaaattcaaagagaagggaaaagagaaaagaacaacaaaaagcacatgacgtcgataacccacgggctcgttggtccgtgcacactccgcgagatgccggatgcagtcgatttcttcactcgagggctatttattgacatatttgtaattaaatttcgatatttacttcgatatcgacttctctatttgtgtttgtatgtttctgcttgcgtttggggctgtaaaacagtatgcatatgcgttggaatgatctacatgaagtactccgtactccgaacatacaacagccttacggtcaaagagccgcatgtgggatagtatagcagtcataccatagtcatactatgtagttgactttagagtgccctgagctacttgaactataactattcattgcataatactaatcttctactccgaatattgtacaatgtataaaatcaacataaaatgccaagcggtgtggcttatcgatagccattgctgaccccgatgacttcactgtttttcaacgtctgtcggcgacctcggcaagactcagcacttgcatttgctctcgatcttgttcaattctatttcccctcgttgaatccctggtggaatgcaagccagtgcccacatttgactgagaccgtctttgtggacctctcttgttttttttttccgcatccggtggatacgcctgcctgaccgctacgcatacgcgacatccatggagctcgatctggcattgaatcctctacctttaaaataaatatattctctgtcgccgaagtcgcggcccgggttgacccagcaatgtcgcaaaataacaccctaacggtgccacaggtgaaaaccaacacctcaacaagtatgtttctgtccaagctccaatcatttccatttcattgctaatcataatctgcttactgctatagcctcaaaaacaccctttcactttgctgctggtctttgctctggccttacctcctccatcctcctccaacccgccgacctcctcaaaacccgagtccaacagtcccagggagccgccctcctcccgactttgaaggctattatatcctctccgcatccaattcgcggattatggcggggtacacttccttcagccctccgcaccggcttcgggtcggcaatatacttcaccagtctcaacgcattacgccaagccgttgcgcaaaccaaccccaaagccttgaccaatccggtaacaagcgctaggtcatcatctgtcctcccaaaactctccaacacagccaatctcaccacgggagccgtcgcaagagtcgccgcaggcttcgtaatgatgcccgtgaccgtgatcaaggtccgttacgagtcggactactacgcatatcgcagcctaatgggcgcaggccgggatattgtccgcacggaaggcctgcgtgggctcttcgcaggattcggcgccactgccgctcgcgatgccccatatgcgggtctttatgttctcttctacgaacaattaaagcgacggttcgccctgatggccgcgaaaccctctaataatggcgaggcacccactgctgtttcgtcctcgtcaatacacttcgtctctggtggagcggccgccggcatggcgactgcaatcaccaatccttttgatgccgtcaagacccggttgcagctgatgcctgctaaatatgggaacatggtgcatgctacgcgcttgatgatccacgaggatggcatgcgcagtctctttggtggacttggtatccgcatggctcgcaaggctattagctccgcgctggcatggactgtctatgaggaactcatcctgcgcgctgagagacggtgggaaacgaatccccagatgggtctttaggcttgtgttttctgcctttcctgcccctggctatctccctccctcacatcatacccattccactttctgtattatagtctgttaagaccccattctagctcgcgtctgggtccgtgcttagagatgcatatctgcattgagattgacccaatgtgaggttttcttacacaaagctgaggcctgacatgtatattgtactgcatctgcatatactgcttatcatatcatccccgaccccaactttccatttatactaggggtatgccccaacctagctataccaagcctatgcccgtgagatgttcactacatgcgtagattagacagggtatacaaagtaaccggtacgacgagagaagatagaatcagaataaaaacatagtcatcagttcatatcgcgttactatactaccacatgctctgtgatataaaaagaaacacccaaaaaaaacaaacaaatcttaacaaaacacaacttggcacaatctcaacaagaaaccaataacaacgtttacatataccggaatccaaatttcttgtcacacatcaatcataggcaaaacagcgctgaataggaaaccatttatgcgaagacgcgcacgcggcccgaagggctcttcttccggaccaggaacatcttgtcctttcggcggtcgttgactttcagttcggtcatcgagtgggatgtctcggtgagcatcttggtctcgcgtaaacgtcgagtgtgggcgaagagctgttcttggaaatcgtcgtcgatccacttcttgatgatgatgtagttgttgtcatgctgtgaacgtgttagtctgcattgcacacacacggggggtatggttcttacctcatcccaatcccaaggcaggccgtaggctatcaaggtctctggcatcaagtgcttgcgatggacctgggatagtgttagttgaagccctagtatatagagggatgtatagagtactccataccttgatccatgtgatcttctcttccttcctctcgtcccttcgctcttccctcctctcttccctcctatcttcttccttctctttcttttcttcttttttcttctcgtcgtgttttttcttattgatgatgccgtcgatctcctcctcgctatagccaatgctgcggaggtgctcgcggaactccctcgccttctgcatggcctcctcagcctccctctgcttcctccgctcctgttcaagcttccactcttcaacagcagcagccttgacagcgagctccttcttcctcttctcctcggcttcccttgcctttcgcatatcctcatctcggatctgctgaatgagcttttcgcgctcctcctcttcttccttctcccgggcaagccgtttccacttctcctctcgcacaagcttgtcccgcgcctcttgctcctccgtcaaccttgcaagctccttccacttttcctcccgcacgagcttctccctctgtattttctcatcctgagcgcacgcaatttccttcaaccgctcctccatcagtttgcgtctaacctcctcttgctcagcagcggctctcttctccgccgccagctgcttgagctggtagcgctccccagccttgcgctcctcctcctcggatagatgcttacgctcgaagtgctgcagcttacgcagccgatccgagatctcttcctcgtactctagctcctccctgagcatgcgagagtcgtgcggatcgggctggttcacaatgatttgctcgcgcgaacgtgaatgctcatgtgaacgctcctgctcggcgcgccgagacttttgcagctcccgctggagccgttcgatctcctgctgatgcttccagagatccatgtcctggcggaggtcattgcgctccagcaattgttggcctatgtcttgccggatgtcgttgcgctccatcatgtgttggttcatagctagctcgtgatcacgttggaggggagaggctgtgcgcgagacgttgctgacggcgcgctcacggcggcgcggggcgacaggcacctgcacgatgtcttcctcctcttcatcctcgaagcggttgacgttgtacttatcgctgaaccgctgctgcactcgtcgagactggggcttgttctccgaccggctctctgatttcaacccttgctcgttgaaaatcattaccgccggtgcggtgggtgccactggtagttcatactcgcggtgtcggctactgatcgaggccgaccggggtacacgggtttggataggtggtgttatgtactcgcgtgtgatgatttccgggcggcgctggcgagaaacagagcgctcgcggatatgggttctgacacctgttcgccgggtggagacgtcggtctcaaactccgagtcgtgagaagaatactcgtcgtcatacattgctcgtacgggcatttttggctgggttgcgaccagtcgggtattgataatatagattccctgatagaggggcgctgggcggggttatcacagaagatacgagagataccccaagagaaagcgagagaaatgagaagtaagctgaagaataaaaactggctgaaatactcgaaatttgtgtacgagaggtgtgcgcttagatcttcagccaaagcgggggaggggttggggagaaagagaaaaggaaaaaggaggaaagccagggagtgcccttttattttgttcaggcgtcatgggcgtcatttttaattcacactgtatttcagcctcatgcataatctttggattcgactcgagaatcttttccttcgacagactccaccctctttcttatattcccttctatccttcatatactatttccagattccctcactgttgtactcggtacattgtccacactgtctactcccactccagcgttgggataccatcatcaccaaggccccacttcgagtccattctcgaggattgatgttagcgccgttgacaccgaggcactctaatattagttcttttagaccgcacattaggcagtgtcgcgacacagacccgcgacacatgaaaccacattctttgtatacggaactcaaaccagacccttcgcactaactttgaatgagccgttgagcacgcatccaggagacatcaggcggttactgaaaccgtgtttgttgtgatctcgttttcctgtggatcaccgagtcgcgtcttgaacccgtacggagcacttaaactgggtcccctttagcgctgagtcttccgacctaatatgttgtatccataatcgggacttcgagataccattcgctgcaacactgcattgggcaccaacaatgtctcatgtcttctccatcccaggctccatccacggttgatctatatccattttaacacacagtagctcgccgggtggggctttgcacccatggatattagtcgccgcttttacgggggcgaaggattgcgcccacttggactgagtgattcggcgaaaagcggcgggaaaacagccggaaatggaaatttcatggctgggaacgtgatgctatccatggaacgcagcggtgaacctgtggacgaggtcgggtgctcccgtgacgtgacccatggactgctgactcccgcacccgactggcttctcttggttcttcgtcacgtctataaacactaacatttgactacatttcaaatttctagtccttgaagaccagaatctatggaagttgtacacggccgtgtcggtgcgagtctccaataccccactacatcagtcttctgactgtacggagtaattcaaagcgactactccgtaagtggaatatcactagttatattcccaccacatgattggatgaaagaggggggcagtcacgtatatccatctttctgacaccctaggctaaagctatggagctggacaacgcatagctgcaaataatatcacaatcctttctagttgccactggcccaagggttggcacggcatttctatccaacgcaaaagacacaatatcagaaccatgggaagccagagattgatataactacacactccacttaagcattgctatcaaacttaatgttgagacacctaacccggaaatcctctgaggcctgatcctcgtactccagaatcatcaatttcaaatccgaagctagtaccaatgtgatcgaggcctgttgctagattgatccacttgcagattccaaagatggagcagacaaggcctgcttggctgtcgtacgattacgattcaaaccgatatacccatacccatagtctcgcccattctattctcgaatctattaattcactgcgtaaagcggattccgttcggcatctccgagatgaactcatgttgccatgagggagggacaggataaaggtcagagctcatatggactagtacgtgcccgactaatacaacatagtaccacagaccaacgccattggcgtcatctctgtagccaggcccattttacccggacaatgacgtagatattggcagcataggcgctcattcctggaatgagaactgataagacatgattcatgtgacaataccaaatggaaatgttttttgtggactttgcgctactgaccttttctaccttggatccttgaggaccttgttgaagtatactttcgatcagacccctttgcatatcagccctatcaaattgccattttggtgagacactatgcagatattaggcacctaccttgtacgcaccttatcgcgtgtcgtgtaatactagacagcctgaaagaagtaaatttaaacgtgcttcgcatttgacccttgcatcgtcggaaatggcagctgcagcactatgagctactaccccacaatgcgcttgacagctagcacaatgaacatattaaattgggatgttggcaccgaggctacgtatttctcgttagacgaagatcaatcaactcttaaatccaggattaggattagataagaatccacagaaggggaggatacctgtgtaagcaaagagattataatggtacgctctttcctcgcttgattcattcaagaaagacatttttgcaaacaaaactccgggtatctaagtcaccagccggcaatccaagtatgtatagtcgccagaacgtgaccaggagccggacatagaagggcagatattggaccttccgtgcatctccccggcatagtgtatcatatccaccaacccatcgcaggtccgcccggaagaaaatgacagagcagaatcagccttgtccgttcctgcccattaagattcacattcgcgagaatcgctaaacctttggtataaagataccacaatcaaggatacccgccacatgggagcgcatcgcgttcgcgtctcgctctcgtctcatattcttattccaacaatctactcacgccctcccagacttgagaatctgctccaagttctcacgactcttctggttcgtcgtctcgtgatattgcagcttcttctcgaggttggagatctcagcggtggcctcgccactctcgcgcacaagacgcttgttgactatgccgacgggaacgttgacgaacctagaacagggcgataagtcagtttcatttcacgagaaaaggggccaatgagtgatctcgccgactgtctcacagtttcggggttgcgaaattgaaaacaggaaaagaaatgtgataagaaacaaaaagccaggataggaaagagaaaacaaaagctcacattttcccgacaccctcgtaaacattcgtatcagaaggcaactcagacaactccttcgatgtaagctgtagcatgcggatatcgcgctgcttggccgtcatatgagccttggtgatactgatctgctgctgcgaggagatcgcacgggtctcaatctcctggaagagctgtagttgtttagagccattagcatttgcttgtctttattggaattgacgtcctcaaccggaaacagagacaagaggctgagtgagaccgaattggcttagcacaccgcttcccatgaccacctgctcgcggtatccgacccaaatatgtaaaatgattaagtctaagacacaccttctggagagcttcgttgggaatcgacatcttggctgtggattgtcttcggagcttggatgcggttgaggggtaggaggtaggaggggtgcggaggacgggcggaggtgaatttgttttgttgtggactccggattagaggtttgattttctcgctggaggaaatgggtatcgatcgattgatttttattgaactgtttcgcacgggtgtctctgtcaaatgtcttggtcaacaggatcaattcgacttgctcggcgaagccttggggttgaggcggtgggcaagcggggcggtggagtattgcctgacttagggctcgaggtatacgagaggtgtgtcaggtctcagagagagcatggagtttgtgttgggcaaggcagattgatgtgtttatctattttatgtgcctctttggttgaaaggatctaactggattagatcaaggttgacttcagacattcacactttatgaactgtctaggaagcgcaggcgcaatacacttagagctccttgagttaaaaagagaaaaatgggacagaggtctttggtattcaaaccaatttattagaaagaaggacctatatgttctgtctagcaggaacgacatattcatacaagaattgtatgcaccaagctcatgacagtattttggacttgaatagcttcattcgaagtggctagtcccattccaaatctcataaataagaaatctagcagttttgcttcaaggggctaaacaagtttgcaaaacctggcgagctcataaagacatggaaatcactaggaccattgcccatcgggaccttccagcatatggcaaccgcacgtgaatctctcaagtagcggtgtaatagagtacgatagaacgagacatcataatattccctgcaagccatgagatccaagatctgtagggacatcactgccctttacagcatgtgaagatccgcgtaggctaactaatctaagaccggtgacaatctaaagcctttacctaatgtctactggtttcaagatacggagtagagagagatttgaatggatatttgctaaaaaaaaccaatgggcattaaaaaaaatcacgattcctcccagtgcataattccttcgacgtgaaaatatcagaaatctaaagaccagaccctaagtatcgaatcgatttccagccagatccgaaatcaaatgaaagtaagacaaagtccagattgatgggcatgacagtatgaaaagtaaaagaccgaaccaaggagattattcatgattcccgtacgcccagactccgtctcccattggcgtggccgactctgctcatgttctcatccaggagtacagcagtaagttggtcagccaattaatagcgtgggagactatgaaaggcccgatagccatgggcattgcttgagtgcttagtagttgttagagttgggctcagtggagcaccacatctcgaactcagagctggtggggtcagccatgctttcatggcgagccatatcccatgatggatctcggccttcgaggctctgcatactggggaggtaggcagaggtcatgctggaatgcgcgtatgaaacggcgccggaagacatggccggcgccgatgaggctgtgtaatagccggttggagtctcgtcagcccaggtgtatgagccagggttggcataggaaggagcggacatggcggaaactccagactcgccgttgctgagaagacgggggtccatgtcgtgcatggggagaccgtgcgagtgagtaagctgaggctggagcaactcatggtgagtggcaccagggagaccggcgagggaagagccatatcccatatcctgttgagggctgttggagcggtagtgcatgtctccgtaggattcggtgggctgcatcattgggaggccactgggatggcttgtgttttgccaggaagggtgaatatatccgggtgtcatcataaagtcaggcccaaatggtgaggaatcccggctactatcgtagtaggcctcttcgaagctttgggatcgtgagtgggcgtaaggagacccgcgatacgtcgtcgatccaaggtcactttccatgtcagagaaaccgccttcatcggcgacatgccctggtgtgagggcaggagagccactatcacgtcggctggcagtggctgcggctttgttgggggagaacttgtagttaggatgtgttgcggcatggttgtcacgttctagcttcgctagatcttcgtatttccgtcggatctcaaccggctctagcttccagccctggccagcgatcttggagacgatctggtggttgttcgcacccactagtcgcttggtgcgctcggcatatgcagaccgataaagcatgaaggaattcatgggtcgagagatcttcccgttcttcttgcggacctcgtcctgtcgctcagaggccgatcgagagacccaggcgtccatgtctttgataggagtagtgtgaaaagattcagtaagctgactgatgggtccctcaagctggatacctgaatcggagagttctctccggttacggttgcgccgctgtcgggctgccctgactggagcgtctctgactggtgttttagcacgagaactgggggaccgtgaccaagctggcgaagaggtcctggtaggtgaccccattgggatgagatcttcatcagataccggaggaggcgtggtgacctggccagacatgatctatcttggtcagtgtcggtcaatggagaaatgggagtaaaacttaccgattgaggaggcatgtgaggataaccggggacggtgtagaacggaggagacccgtagtgctgagatggttagcattgctatgaggcaacagccagaagatcagacttactatttcttggccactgatttcaccagacatctgcatgttgatgcacactgctcggtacgttccaggaccttggaaggactcttcgggcaagggatgtccgtctgtagattggggaggtgtaggaggaatgggtcttgcaaccaaagtcattgttgtgatgctgatgagataggataaaaagaggatatgagttgaaagctagggaggaaagaagagaaagagggtttccagaaagaggaaagaagtggaagaggtgtagaatcaagatattctctgctgtcctacgcagacgggtttgtctcgcagttacgctctcctgaaagagaggtctcaaacacgactgcagatgcacccgctggcagttgagacacgcactgcaacaatccaattggatgtgtggatgtaggtaagtatgaagaccctaggtatggagatcaagtggatatgttcaaagaggaaagacaaaagccaaagacttggatattgccgattgaaagatgggcgggtctcgcaataaatagaggagaggggagagcaggcaagtagccagagaggctgaaacctccagaagaaggcctggaatacaatccgcactctagttctggatgtgattctgagattatttggattaaatcgaaatagaaatgcaatttaatattctcattaatggaattaatcgcattttccagatttatttaattggatttcgcttttctttatttgatttcctttcctttcccttttctactctaaatccagtggaggcgttcatggcagattatttaccactttggtcctagtccgtgctattggcgtgataggctgcatttgcaatattccattcaatgctgaaatagcatggagatggatctgtgactgccctatatctcaaacatattgtctttgtgccaaatttggacacctacaaatagcctggagagaaagaaaaagcttcggctgggtgacgatgtacggctccagtatggagccattgcactagggcagaccatgggcctgtagggtctttccaccgcccgagacccggggatgcaataggcccgattaaaatggaaaaggagacatccggagccggggtaggtggaaatgtaaatgtagtgtgatcttagcttggatgcagggtcgttgggatatttcttttttcttatttttattcttttatacttgacactgacactgacactgacattcgaaaaagcaaccacggggaagcgtatagttagcagatgcaagtaaccagaaagacactagctcggacagaaacgggaaaatgaagcactagttgcatgccatccgttgctgtcaagcgcgatatacgtgatactgtacggcagacgtttagagaacgtcgcagagtaaagccaagcctgcaagacatgcgaaggatcatgacaataccagtaacctccactcgctatcacaccgattcgctcgtctcctccgtacgagtcatgaacgaccacttctatcgaggcatatccggtccaaccaaccaggcgagagaactgctccccctcaaagttccccagtcagcctgcgccgagcaaaccatggatggctatgcagaaaaaggcagcagtctcgacggccggtgtgtatcattgggtcccggggattcggggagtcgggggccctttttcccttttccccttctgccgtcttcattaatgtaggtctgagcttcggggggaaactcttgtcccggtctatcgcggctgtagtggagtgggcccgcgctgatcgacggtaacctgccatcgcgtccagggttggaatcgatatcgtgaccggcaaatccaccaagtccagaccgccacatccacgctgattggctggcttcgaccggcgtaataaatccggcgaaggcccatgccaggaatggctcgattgattgtggcacgggggccatttgctgggcgtgacctgccgtgccctcattttgactactgctcgggttcccttccgtggatacgtctcggatcgtgccatttcactagatggtacggggtcgattgagatttaacttgcacggaaacgccgatctataatttgtaatcttctcatcggatttcggcttgtccaggtctccagattcatccgtcgatgttaaaaatccaacgccacgggaagtcatgaactcattgaacgcatggaagatctccccgaccagtgcttgtcagatctcgccattccatacatgcacggcggttcgcgcttactcggggacatactctgaactcatttccagatcaagattagcagatacgagcaattgctttgacggtgccccaggccagaccggataggccatggcatacaaggatgttgccaaagactggatgtggctgtttacaagtacgacgagcgcaccaaccaagccctgcagtttttctagaagactatcatcccccgcggactggctcgtgggctacttgggaccttggacgcaggaaccagccacgttattgcatgccctctcgccgtgtggcagtcttggccatgcatgttttctttgtctggccctcccccctgtccttgtcgggcactcgaaaaccgcctagagggacgcagcacgtcaatcaattgctagaatagtggagtgtagatgccatgtgtgatctacaactgttgaaggctgagacctgcagcatgtccatgtgggctttacccctggctcaaagaaggtggggagttgatacaagcctgcgcattgagcttatcttttgacctttttttaatccccaggtggccctgtaagcatcttattcgtggtccatatgccgggatggtatggggctgagccaaaacggattccacgtgtttttgaatgatcaaagcgatcaaagaaataacattgagaccgtaaccaagctctttccgccgactcggaggaaagtatttggactcactttgtagtgtttcgtataccaatcccattcgatagtcgaaacacctccaatgccttgtccttgaagtcgtacagcccttagctttgatgcagcatatccttaatccaaatctctaggaccaaaaatgagggatcaatagagtattctccgccgtaccgggggatcatcggtgccaatcactaaggcgctgtcaaccggaatttcaaatcccgttcccaacaaggctaatcgacgacgaatgaggtgctcaagcgtccgagccattgctgcaactggctgcgcactcacgaactcttctctatcacgtatgaacccgattgacagctaggatcaccccgctcaagcctccactgatttccttcgaaaaccttctagaagtccagagccccgacagaagaggataagccccaactctaaccgtccgttggtcgcagttcagtctgctgactcgactgcgttcggattgcacaatgtgcacagactcagtctgaccggttaacggcgtttcatgtcagtccttctctttcatccctgatcgcctgtccaagtgtccaagtgtttcgagtgtttctaaagatatcctcgtttcaagttattctcgcgttcattgttgctattttcatagcgatagcaatgatagcatgggagaaagagagaaagagaaaggggccggggatcgatcagcacggggaaaggagatctacatttgataatgaaaaccagcataaaagaagggtgaaggggcggactagcctcagcaactttgttactcacattctcattcgatgccatctagacatgttccccgataccccgatgcccatgtccgataccctgaaccttgcaccctagtccccatagtcccacgcctttagcaggggccctggtcaaagtggccaaatatggctgctgctcttgttatcttgcgatctgcctgtccttacctaacagataatcggccatgaaagggcctgcgtgtgtttaacttcgggcgtagctgcattcgatcaccacacacgaacgccatgccacctgttgaccaggttctcgaactcaattgcgagttgcctcaccacaagtcgaccacggcccgcggtcaggccgcgatggattacgagagccagaaagagcggggagaagttgcacaccgggattgacgaaactaaaaggagacccgtaggccgtagaccggagttagccagcagccaacggtaaatcacgcgcaaacggcggatcgtcatttgacgttcgcccgtgggccgtgatgggccttgactcttcttcgagccccatacaacctaactctatcctatcaaaccctaacctttgagaaaactatcgtggaaaagaaaaaaaaagactaataatgtccccgacaagcgacgaccgacatgggtggataagatggtgagatcagatctgggttccccaattcccagaccgccacgaggcaatcctcctgcgcaaccttacacaacagcggctagatttaatttgtcatgcttgtataccggggtctgatgcgcttgatacccaaaggggagaatgagctgcgtgcaataatctgcaagcctcagccatatagccaaaatatagtcctggcagcagccaacagttgggatttcctcacgattggtgcaaatttgggaccgttgacggtttatctgccagaatacgggcgacgaactatgtagtttttgaggcgtccttcgtgctgcgtacggagtactccgtagatgcatctcttgtcctgcgctatttttcctgctatcacaccttgcctgttgtggttaatgtataagttgtagaagtcgtgttatccctggccaacattgactacacgtcttcgttcctccccctcttccctcggttttctctcttttaatattttattttgccaattcccactagttttacataggggctgtaatggacgtcgatcttcatatcgaggattcgggggaatagactttgcatcccccctcagatgtggaaagttgatatgtgtgatttgggtgtcacaactctaacgcccgacgacccgttcctcggagatcggactgcccgagacgctaggtatgtttcttgtttctgattgattaacttgtatagactgacattcgcttgtattgtccaagatcggtcgagatggtaccgtgtttcctacgagcaaagtccaggctaagagaaaggagtcagagagaggctaccaggagaaattgtcggagatgctagatttggattctcgggtatagcggtctattttctgtgttctctgtctttaccgtggtcaagatacttgatttgattatcggacgaatgctttccatggtcaacattctccgcggtcaacaccagttctccaccctcagaatcactgaaatcaacaagtacaatctaacgcccagagctagccggatgaaccgagacccgatcactaatactagcaactcaaaagtccctatggggtactggtccgtaccccggcccagattaaccctagaggaccctagccccatcgaccaggaccctggtcggcttggcttccggtcacctgttcagagatcgtccgcggacatagctatctccggaccatccatagccctactgtaccttttacaatgtacgttgtccagatatgacccgatcggcgagacgcgttactcaatttgtgcaaatcatggacattagagttcgccgaaagctgaaatccatgactcagacgaatcagagacatgtggcatgagctagaaagggcgaggccaggcgacgacaagagcgaagatcgtgggtatcagagtttcgcgcgacgtatggcgatagtgtcacccatccgtcacatccaacggcgccttgactacggagtacggagtacggagggcctagtgcagggtaggactgctccactgcgggtatcggtgcactaactatgttgtatcagtgggttcagtatgcgggctttcggctccggattctggcgtacctatgtcggtactgattctcagggaaaacggaacgaatacgggatacgaggggtttttctctacgcgctaagagaaattaatggctgcctcatcgcgaaacatcctggtcgttatccaaattggaataggaatcccgatcttcaatctgtaggacgggttgggttcctagttgggtctggtggatttgaggggcaaacgatgggacagagggattctccgcttgggaatatgaggagttggctcttgaagcaggggccagtgcttggtataatattatacttctacaacatataactatacgttgtagaagtatagaagtagatattgtacctgatctatgcatatggtggagtacgtactttgatcaaagaaagagatctccaaagacaaatgcaattgtctttcctttcgttcaaggaaactagcctactagcctaatggcttactggcttactggcgtagctaggtagtggggggtaagtagtctgtggccacccgtgtcgttgacaaatacttccctgctcgcaatccattcttagacttgcttttctattttatgttttataatcatgacgtctgtattcaaaatctgttatatagctctccccatattccatagctatagcactatctttgtaagcatctaactctccagaacggcagttacaccctctgagtggccgggccggactgcgaaactccactctcgctgttctcccactttttcttccacatttccagacaagaggctatgagctgcatgagtggagaaaaggatcaagaacgcttggatcatgatcgtgtctgccgtgtgaacctaataatacgtctatgtgccgtacttagattgccctaagcttattctggcaatgccacgaaaggagctacggagttatgcagtgtggagtacatatggagtacggagtctccgtaacgaacagactaaatctctagatcccgaaaagcgaaccccgggtctattttctgattggatcggtaagcttcattttaatagctaatcattgccttccaattaatatagttatccgtccctggcggtctcgattctcagccacaagaaggcgaactaagtggctactccgcacggcaatgagacatacaatatcatagctacaataccatagcgggggattcgggatttacaactccttcacttgatcgtagatcttttggtttggacataccttggaacgtatagatgtgcagatatagttagtcccagatctgatcttgttgaacatcgggagagaaaccatggtaaacaggtggataatgacattgacattcccattcacaccggagctcgccgtctgtagaatccggatattgcggatattgtagtctatggggtatacattcgcctgtgttgggttcatttccctaaatcgttcattttattagaagtttctctattttcatcattagcctaagtactccatacaatccacaatatccgtgcccaaccccctagagtaaacttatgacagcaatgacacattgacaggacggcagatcaactaacaactaactagttagtcctgttacctgtattacaaacccaaatagctgagatagggggcaagggatgagcatgccgctagcgctacaacatacacgattcaatgcatgatctacgtcgatcgcctccggttagcgcctgggctaatcgctcgcaagtaggatgtaagttgactgcgccgcatgctagacccgaccgagtaggctagatgctatcgccatactttttccaacggctttagtgtatcggtaatatgtccagagtcgtacggcgtatccgtacataggtacaatcgtggagtttgcccttgctcatagtcatcgggcatctgcctaatcctaatacatgtggagtgggacatgacgatgggcgggaagaacgttcttttgtcactcctttttttgggtctctcctttttgttattattatctccggagccgatgcttaggctctattgtgtttgtggtaaatgaaatgagacaattaagtaaagaaatggcataatatgattgagagacaggggctggagctgcttcaaacgctgtgagccgcattccgtggtagcacggagtactacctagctaggtatgtatgtagctcggtatgttagtaggcgtatacggttggctgtgcagctgggtaggactgcgtttaggtattgcttttgcagcaaggggtatatgtcgatcgacgtatcagtcgatttggatctggactgggcgtcagacttttgtgttgacgaccacgttgttttcgatagtcgataggatggatatgcagccatcttgtaaaggaagcagatgttgatctgctttatttgatcgactgaaatggtttacaataggttaaactgtaagcacttagtttactggtttgcatatgtggctctactacttggacagggctgcatatatagatctaagatgtatacagccttgtccaaacatttcccatctaccttccatcaacttcagcaagcaagtagttcacgattaatatcaaataacattgtctattaaaatacacttctccttgtccaccaaatggtgcccagggccagaccatctgaaaacgccgctcgagtccccatccatcttaatgcattgtaaaacaggaaaggaacaaacaaaaaagggtctcaaaacgccagcccaccacagtttcaagcagccagtattcccacgagacagacccccgacacgaacgacaaggggaaatctcgctttcaaaacacggccattcaacaagtttgactgcaatcgcagaacttttggaaaaggcaaaaggaagaacacaagaccacgagcgtccaccaggccaagaaggcttcgttagacagatatgaagttcgatgtatgaaatgtcgtctccaaagggaaaatgactccggatcgcctggaaaaggataccggatggataccattcgcgcacaatgatccacttgcgcaacgttctgcaaaagctaaaacagacgtcgaaaaacagtgcgaaagcacagatcaaatctgctcaaaacgcacggtacgacttgtggctttgggttccgatgctttcaggatatatccataacggtgattagatgttcgcagactcaaaaagccaagaaaggggccaatagaaagggtatttggaaaaaacacatgctgttcacaccgttgcgctagaaactcattggttttggccattgctttcacgccgaggcgaaggaacaggatccgggtactgggacgtcccggaggccaagggaggaatgcgactcagcgatggtgacgacatcagatgctgtccattgctctggtagtggtggctctggtgtagcattgaagcattctctctcagccggcgttcctcctgctcaggtgtcatgcacttgacaggcggggggatcggagcatctggggagctgcggcccatgagctttgggctcggctccagtctgcggatgggcggcaggactggtgcgcctgccatgctactgccagtaagcggacgaggtgactgtttggtcgggctaattcccgacatagccatgccgtgagaactctgaggaggcgaagagtggttaccgttgggcgtcgtggcagagaaagatggatagtggtgagacatcgacggagtagctgtatgacctgattgcggacgcggagtctcgaaagaactccacggagatgtatggcttgaaacagacgggaagccggcaatagggccaacctcagggttgccctgggttggtgacatagatggttggttttgaacaggactttgggcagagtgagaggaggagggccgcacagggaacgatccaacgggcggaagttgaggagctgattgcctaggcgggaaggagtgctgagaggaggatggccgcgcgtgctgctcggtggtatgcagcaagcgattcatgccctttggcggggaaactggtggacgaggagggcttgaagatggaagggaagtgtgatctgtgttatggacccggcgctggggagacgcaggaggatagaagttgccatgactaacagcagacgagtgtagagtgggttgtgttcttgagggttcgttttgaatattagatagagccagatgcgatttcttcacaggcgagggcggagcacgatcttcgtcatcctctaacttcagcttcttaccgactggaggagcagccgaaggagatgctgaggcgctgacccggaatctgaggggtgggagtttgggcttgatggaatcttcctctttttgcttgcagtctcggcagacaaagtgaaagtcttccttttcggccgcttcctgtgagatcccaagacacttgctatgctgccaaacattgcatttttcgcaggcaacactgtgacttccatcatcctaggaaaaggttaggctaaggctcaggtgcttggagactgaaactcaccaagttctcgccatacactccacagccagagcaatcaaagatccactgatcatcttgggtaagccctgccaggttcttctgggacttctccaggtcagcctggaggtttcgggcagacaccctactttcacccctgtcaattctttcttgttcttcggcgatcctttccagctcagcctcatgcagcagtcgcttctgttcacggtctctgatgcggtgctcgcgagtcattgtacgcgactgtcgatcttcttcaagctgactttgccttgcctgctccttacgagcctcggctaggtcgttttcacgcttctgggcggcttcggcagcctctcgatcctgtcgttctttttcttccttggcggcaagtcgactagatctcttagcaccggcgacaagctgcatattcagaagctccttttcacgcttctgacgcttgcgctgctgcgcttcctctgccttctcgaggataggcaggacatgctcaactatgctatcgcgtaggtatttctcgtccgcgtccttggttttctggattgtctccaagaaagcctggtattcctggagtgtgacagccacacattcccacttgaaaggatctttagagaaggccgcgacggctgcatcgttggtatccttgctttcctcgtcggaaccctcttccgccgctgccgtagatgtacgctttgacgttcttgatactcgagaagaccggctctttgccttcttcttgggacgctgaggagggggaggtggaggagggtcggtgcgacggtagaggcggttgtcatctagcacgtagtatgatcgcccttcgcgatcccagccaaactcttcaatacgctgggagaggtcagtatgcgatcatcaggggtcaaatctatacgagagatagcttacccattctgtctgctcggtttccttcttttcgggcatcttgtcgcgaatgcggtccgcgttccagaatgtccataccgtcagctggtggaggacacggatcttggtgaaaacatcgaaatacaggaacttgtttggttcttcatcgtaaccgaagggattagtgatattaggtgctttcgcattgtactggcgtcgggtgtattcatcgaaattgtcgaatctgccaacatagtagtgtcagtgagactcaggataccgagaaatgtgttccagtaaacgtacgtaagaccgcgatgcgacgaaatccacttgaggagacacaatccaatctccagtagtttatgagagggctcgggtttgagacattcgacttctagatcctggcgggggcaaaagacatcagcgataattcaatcaagtgagacctgctcgtgtattttctcatcaatgcgacaagaagcgcacagcattgatctcagtccagaccatgctaatagacatacctcaatcccaaagtcctcgtcaatcttcatgacctggccaaagatagcaatgtattgcatgaggcttgcaaatgcccagttgctcctaagctgtgaaagcaaaccaggctcttctggtgcctgttgctcggccaccgaggcgacctcggagtgggtgcgctttcgcgatcccatcgcggcgggacaaccgttaaggccggttttctcaagggtgtcaatgagggggttccctggaacgaaaatgtggcggagatgaaagccagagagtgtccaacttccaaatgagaaattcgagcgtaaaaattgaaaagggcctaagaaatacgaaggttgagtctgcactttttttcgtgtcgtgaggcaagacgatcagtaaggcggcgcgtcaaggaccgtgtcacgtgaacagatgcgtttgtcgaatttagcaaggggagaagggaggatgatagctgaagaggaaatttaggggatcatatcaaattggtctaatcttattctcaaattaaaagggatctatacaatgagattatgcaaacaatggaagatcgaatattcatgaatcggagacaagtacatccatgcttttgagaacaaagtcgcatatacacaagtgaaaacagaaaagaaaaaaacaaagcagacgcctggatctttggatatctctcgctttcaaaggtctatctcacacagagcagttggggttcgtcaaagacgaggagaaaatgcacacagacgacagcgccaaccagaattcgcgccacgacagaagagttccgtcgaaaatgaagatcaatgaacaatcagaagaaaagaagcatattcccacaagcaaaatgcaaagcaaagatagaaaaagaagaaaagaagaaaaagaaagggacaagaatacattaaacctcccccaacgcagattaccgaaccctcaagaaacccagtataaatgcggtaaagagagaaacaaccaggaatgaagaaaaaatgaacttggatccgatgccctcaatcgatgacatacctcatgcgctggatccatccagttcttcaaccacaattttgcgccttgtgtccgttaatcgccagaagcctttcccatgcatatcataaagtaaaatatttcgggagaaagaaacagatgcttttcgtatgttacattgccggggctccatccgagacagtgtcggacaagttgataaggagttgagccaggcagcgcttggtagctgcatcgtcacggaggactgaggagaaggtggcgtcccggagaggttcggggagacattgccgcaaggcctctcgggcccgactgttgtcactgagactgtatctgttgttagagacacctatgaagctggatattgcacaaggactcaccgaaggaagcagcgcacaacatgcttaagaaggcggacagtctgttgctccaccaactgagtaaccatgttgctcaggacagtgcccacggcatagaatctttcatatgtggcgcaaatgtagcccaagcctatatcatcaagaagaattttctgtacgataaagatagcgacagttttgctcagctctgagcccgtttccatgatgcgaaggcagagagggataatctccgtagttaggaggaagttgatcacgtcagacgagtcattcttcaccaatgcgccgataacgcccagcgatgttagtcggaggtattcgaagggacgagacttggaggtggtgttgaggaacgggtagaggaaaagagggatgtgagctgaacgaggaaatatattagtaacctggtttgcacgggtcatgataaatttttactcaccgttcaagaagagagtgcgggtctcattgtgggaggcaacgcattgcaaaagcgccagcgcattgcagactcgatttgacgcggcggcagtcaactgagaagggttcaagagtggatataccgagatgatctcttgaaggagtgcagtcatgacacctgcaagtttccgaccgttagttattgtagacagggctgggcgcacgttgggaatggagccataccaaaagaatgccagatgaccagagccagttcggggacctgctcccgcttcttgctcagctccatcaaagcggattccctgcggtttggatctaatagctcggcgacccaaatgaagaccttgcgattctcctcgctgattccaccgtccatggcggagaccgcatttgacataccatctccacccatgccaccggcgccaccggctccctgcgcatggttcccaccaccattcccgctcatggcaatgcggccatagtgttgttgctgtgcggcggctgcggcggcttgcacctgggcgtgctgttgggcgaccagggaagcgtgctgctgctgcgattggtgtgggtgcggctgagcctggtggtgctgttgctgttgctgatgctgcatccacgaagggtcggcctggggatattgatgttggtgggagaagacgtgttgggtctgcgcttgaagcatggtgggtgatgagtcgtttcggagactcgtaatactccgaaggatcggaactctagcgaagcgacggcaaaattgggtctgggataaagttgaaatggggttaataaggtcaggagtttaatcctgagactgaaatcattgatgactgaagacaagttgcaagaatagtggtagaatgggcagattgggtcgaacaggtcgaacagaggagtgtggaggagggaaaaggcggaagtgaaggcggggagataaagtgcctcccctaagttttgtgtggtcttttttggccctgggcatgtctgtcctactgctatggagtccttgttctgtagctctataattattttctttgctgttctttatcttttgtctcatttgactcggattgaatttgcattattggtgttgtcaaacctgcagggcatccaaacagagcacattgttttctgcaggccaaacagctttctgcagccattacgattttccatgcagttccaaggttgctcatagttatttcatgccggtgcccggggagcatttacagctatcagacagtgataaacaagtccaagaatcatattctcgtgtcgggtttgtactcgtaatctcatatgtacatcgtagtgccaaacataaatctcatatcgacatcgaaacagggcaatatcgtcaatcctagatcaaatccaaaaaaatcatagtgtaaatcatagtgatacatcagtcacattataaatgcagcgccataaatgcataatcgaaccgaggtcgtcgaactgaagacagaagcgacaagactctatcatggacgggtgcgcgactgtcgtgaccgtcgcgtatccctcgttcgtctgtcagaacttcggctacctgtgaaagagaaacgtcagtaaagatccttcgttatggggatatgtgggggcggacgcactactccctgagtaatagtcggaatagtagtagtatgaacttgggtaggaggactcggtcttggcgtcgtcgtgctctctcgatctcctcaatcccaaacatagagcaagagcaccgaagataatggcaattgtgccccagccccatttggactctttcttttcgctaacgtcgctgccttccgcggctggtctggatccgaaccacgttcgccgggcaggagcaggaggaggccgactaccatgcgagtggtgggaatggcgctcttcaacataggttgtttcctgtctgcggcgcttcttaccgatgccgagcgctgcaagcaacccagccaagacgcccctgaagcagatgcaggcgcagaggagtagcaacaagaacgcaccgacaatactgccgatgacaattcctgcaatggcaccaccactcagtccgccacctgaggcttgggccccaatcaaatccgccccgtctgttccaaccggcgctgtgaatccctccgtggtggttggggcagaggttgccgtcacggtacttgccccattgctcgtccctcgcacgcccggcgtggcttctgacccggaatctgttcctgtagcagtagcagtcacaatagccgaagagctttcagcgacacattggccattgtcacattcttgcgcagcgtcgcaacaagtcgtgccgcacgtcgtctcgccgaggtcggctctacacgtgcccgcgcttgtagtagcagctatctggctgctccatacagaggtaacagttgtgaggtcggtatttgtgagcacgtaggtcgttgtgtaatattgatagtccccactgctgctatctgcacagacggcctcttgggcactgttggtactgcacgtctgaccggtctcacagcaaagccagtcattatagccacatggattatcgcagcgcttttcaagcctgttttctccgaagatgtctgcttcagctgcgagcggggttgcggctgcgtggagcgcgtagttgaggagtagggaaagtgtcgagagcactggcaggacggataaagatcgcatcgcaaagaaaaagcgaggcaacgcttgccaaaattcagtggtgaaacactcgaatcggagagtctgtggtttagactggagcggtggtcgtagtagtcttatctcactcgtatactggagagatcttgtcgatcacagacaaagatcaccaaatttttgaaacgtcaagatatgatcggaatgcagacaaagaataaagaagaatgagagaagtcaagagaaaagagttctagtttgttagctacacaacatctcccagcctctccagtatacccaaccacccgatttcctaccaatcgcctgagactttctttttatccggtggctgggactcggattaaatgagatttactgcattccgattagcccaacgctattttccgcctcgaataacaagccctgggttgcccccctaccggcgtcctgtcagaagcgatcaacgggttggatgcaggttccaccccgcatggcagcaatccgcttccaaggctatgtccaacaccgccatttcagaattgccatgactcaggtctaacactaaacactaaagaggaacaatccacttgtgtacgttgggcagccaagagtctcgtaaattgcagcgaagcgtggatgttgtggatgtcggatattccgtgccaccaatggcagcccaacgatgaattgtccaatccgttgaagaccctgacatacgattaaacaggcacaggcacaggcacccaggccccggagagctgctagagggacatcctctctactttgaaagcgatcaaagaatcaaaacttacccaagagaattattctaatcgataattactactctgtcatgccactcccttgctaggatggttcttttcttgctacaacatacaacatacggaaatatctctaacaacccatggttgcatattgaccgctatttcgatggctccgaactagcgataatatcaatgacccattccattccatgggaggtgcaagtgcggtctgccatcgcccccgaagagtgtcttaggtatcgtcagactgcttacgtgaggtcatctatggatggcgagactcctcgcatcgccaatattggccaaattgaaaatgtgcttcggactatccacgatcttgctccctgccgcctcatgtcaagcatcctgccgaagccttgaggtattcttagtctgcacgtctgccagttggatgagattttgaacccggctacataacccagctggcatgcggactggatgcgacgaactgggccgagtaagaagtacctgtgcaatgaaggaattcaaacaggccctgatgttgcggagcatatctaatcaatttcccactgttgacaataacgccatcaaccatttctatgctcgccaaccacatggtcatggattgaacagcaatatgcagtctagttgtctcatcttgaattgttactgtctaatctatggtccatcaccaacttggaatgaatcccccttgatccaattaccgagatctttaggcaattagtttgacctgctaaaagatatcctaggaatgtgttgcaatgagctttgggaaatacttatgaatcagccaaagacattcctttgcttgtaaataacctaggaattatgtaactagtaccaaacatccagcttacacggagaaaaggcgttcgtaattatggaatagattatcaaactatgtatcatccaatttcacacattcatcttgacaaacaaacctcttactagactctgccactgtcttgtccacacatatgtactccgtatagttgtaggcggtcattttctgcccccaaacagggattatattgaactttaaggatgtcttttcgcccttcggggcatatggtcaaatgaaaatatacagagaagattagcatggcccctgcactaaggatgacacgctcaatcaaagagaagctacctattttttttcttttacaggtcctttttgaggttatacaggtgtgggtcattttgacgcggtataattggtcttacgccatcgggaagtcacgtgcctgtctgatctccacggtgggtgtacgaatcccggaccgcacgaaaaagtggagcatttatcaccaacccacggtcaggtcatggcggctctgtgttatagttgaaaagaatgtcgtccagcctagatagtaataagaacaaaaaccatgacaacttaacgtgcgtatatccttttcatgaacttaccagtatcaaatttgaggttattcccaccttccttttgcttctggaatatctgttgaaaggtcacctgacctccattgtttgctcctgctacttattccacaaacctgtagatagtttcttccttcttacccgcaactgaggtcttctataagtcatatatatcatcgagtgggttctatataagccctttctcaacatccttcatatactttaccccattcttatctactgagtcatcatctatacatcttgggttaaaatatcagaacttcatcatcccactatctatacataaaccgagcaatgtgagccttctggagtctaggatgaatgtatctctgacacttgaacagcgagtatatcgaaggattctacctgttccgacgtgggggctcttgaaccacgcggtggatgagcccgtcgaatcggaatggcatccaaacactcggtgcggtgatagcgactacgaatatcaacatccgtcttggtgatcacaagtcggcgggtacctcttatcggaaaccccagatatggcaatggtcttgcgaaaatccccggtagctctgacggtcgtcggagaaatgaaggtaccacaactgtcacatggaagacggcaagtttgtttcctgtgtccgcatcccgggcatgggtgtctcaacaattgccattttggcaaccagaaccaccgtcgcgattgggacgagggtacccaaaagaaaagaaacaccagtgaaacaagaggaagacgagcagcttgtcaatgattcgaacctgaaaccagccaaccgacaatccaggcagctgcagcgggtatagaatgggccatagtgcataccatgaggacgattggacaaatcgttaatgagtctctgctgaaccttctcaaagctctcaccatgaacattccaggtgtgtcctattgatagttgctgagataaaacgtgaagtcaaaagctgaagcctcacctacttaggtccacgggtcggatgcccaattggctaaggcacaacatggaccggatctcgtttagagtagctctcgccctcttctctcttcctcttttccctccctgtccattcgcacggaaccgaatcagacacactgtttctcattatctacactatagcagattcctattatctagtaataaaaaagtcgaagcagtcccgggagatggcatcgaagggacatcgaaccaccacaaggaaggaatactagattatgttttggttataatgaagacgaacgtcgtgcttggggaagttcagatgcaaagaggtgatgagtcagggtccatcgtgtcccgaagatcaaaggagctggggccgcgatatctgagaagaggaggaaattcggactcggacggagaggttggagaggaagaatattcagcgagaaatgggaattaattcagacatgcaatattcccgactcagtaggataaaagaaaagtactgtctaacccaggaagaagtcaacggaagaatatccagatattctcctcggagaaccggtcgaccatcttgagcgtgatattgaacgaagacccatggggaatggggtttaagcacgggttcaaaattcaacgctcgggacggagtaaaaggaagggattcgaagagtatcataattctaggagttgctccacatggcgatataaaatcacaagaaaaggaaaaaatatacaaatcaaaagaacgtattcaaaatgtcgtttcagatccatcaatcatataaacatccccgcaaccccaaccgccagcccaaagaccagatcatggagactcgacatccgcacaggagaggcatcattcccattcgcctccgcactagcagtctgcgtggcaacgctgctacaataccccaaattgataccatggcaagcctccaaactcaagctcgagcaaatagaagtcgcctgcgacgaagccgtgacagcctcaaccgtcacacctcccccagcgccgtcaatagtaacaccgtagcgacccatcagcgcgccagtgcattgtgtgtactccgactgacacacagagtagtaagatgagcaactctcagcatttccaaaagaagtcgggacgacgacaaatggatacgcggcgtctagcgttgagccggttgcggacgtctcgccctcggtagtggtggttgcggttgcaccgctggggaacatgaacgcggtgcctgtgcctgtcgtcgttgttcctgttagactgccggtgcagcttgcaccgctcgcgcagcaggcgatgttgttggcggcatcgcgggagcagttcgttccctgcttacagcatgcgtcgccgttacccagatcggtgcaggggttgtagccgctcggacaattgttgtcggctcgtctaaggatgcggaggacttcgaatgcccgtttgttggctatggctgcttctgcggcggtgaagggtgctgtttttgtcgagtggacggtcgaggcgaggaatgtggcggcaatccagatccacctggaagtccgcattctcgggatctagggcggggttggaatagtcggtttggggaatggcctcgagattttggttgaattgggtgagtttaatggtttattctcatgcttcgtttcgtcgttggggtcgttatccggggttgggctgggtgtcaacaaactactcgaaagagtaagattagctttcaccggtcgcgatggtgtaattgaggactcgagacttgaaaatacctgggtacttgctgtctgaagggagattcgagggattctagaaaagatcggagttagagcacaaatgatgtagttcgcaggtcgccaggtcacaaatctccactgggatgccccagcaaccgcagcccgacactctagatcggaagcccaagcttagattaatttttaggttaatttctattgacgagggcactggtagtaataggtagtagaataattttaataactactaaaatataatctgtgaaacaaaacgtggacacaattcggcactcgactacggagcacgaagtattgaatatacagcagctgaatggctgattgggcatctgaatattcaacaaatgagtcgggcatggatgttaccagtcaggagcaatccagtaattcttcgcactatctatatggaattgatcaattgttccctctacgccgtctcttccaaccgtccaaacaccactttctaccagttctctccaccggtctatcagcctctccaatctttgagcccgtctttcaccaccaaacggatggaaaataccatgttgaaagagttgtgtgacagaccctggcgaaattgatgtcccatcactcattctcgctccgtcgtgatcccagaaaggtagcagtagacggaagcccgcctcctcgcaatcgtattggcaccgccgcaccgactcactatatagccccgttggaataagatcattctcgtcgaatggtatctcatctccgggcgcaaagaaaagccatcgaatctcctccccgaaaccgactgtgtggctgctatctgcagctgcgaagattaggacgggcgggatattgttgccccattcctcctgttcgcgaggtacccccgtaaacctctgccgagccgtgaaagccatggtgtcgtgcggaacctccaagccgggcgcaatggctctaaaacggggagttctcattctcgtcagaaccaaacgaatgaagcactcctccggtatagacgccgcatcaagctctacgtctgtgaaaagtggcgcatctctggagacaggcaaaagagatccagagggcattctggcttcgatagccgccgagtaccgatctatagcagccacagtactgtcaacctgactaggacaatatggaagccaagaccaaagcccgatttgcgaccgggaatttgccagttctttgggcgcttcgccctctggtgaatcggtcgtgattttaccgatccgaagcatataaatccagtgggtaaggatcgtttctagtgggaaccacatatcctcatgctcgccgatcggctccacactatccagattttcgagggtcattgggaaagcagcacggtgcagctgctggtcatagacgaccccgacacaatgcgagcctaactcaagcacagtgccataaataataacgaatcgttccagatcgtctaagtcgttgtcctcacccagaaaaatattgtcgaccaactgcattgagatatcatttatccagtaaaagaagcctggctcaggcgagaatatcgaatccaggaaggaattcactgaggggtggagtcgttcgcgaacagcctgtgtatcttcgtctgcgaaaatgaagggttgactagctaacacatcgagattgggcgtctcttgtccgtggcgggccatccatccatacgcaaccaaatagttgtgtagcctcgcacagcgctcataatcgaggggaccattgagacgtgcagggttggcctccgacaccagggcatcctcaatgttgagaatttgctgtggcgttgtattcatggtgaattcatggtatgcttaggggcgcattgaaaacggggctcaattctgccgattttgcaggtttatcaacgccaataccgtaatttatgcaaaaaccggggtttctgggccccagtcacatgacatgcctatttcgaccaggttgtcaagttgctgcatgtcttaagaggtggtgtatcgccggacagatcgatccgacgaccgatctattcgtgggggcatggaacaacgcagtggggaaattgactctttattttgcattgtttagtgcttttccagccacttgtacacccggtctgcgatctcaaggttgttcttctccatgaagaacatgtgtccgttgccatgaataccctctttgcctagatctgcgtactcaacgtccactccagcttgctccagatacttgacggtgcagtaatcgtatggcgcgtggaacgatgcttcgcctgtaacaacaagttctgggattttgcccaggttcgtcaactgcctcgctggggatttctgcatgatgcattggtcgtgatcagcgtcgattgctggctcgatggttgtctcaatattttcggcattctcgcctgcagacggttcgtatccgattgcgaggtcagtgagaccgaaagcgaaagctgggtcatttccaaacggcgggcggagcgtgaacggcggaccagacggctcgagttggacaatacctttgactaggtctgggcgcatgtctccgaccctccagcctattcaatcgttaaccacctcagcgagtcatagtgcttggctgaaatcaccatatgcacccgcctgcgaatgactgatgatataacagtcaccgacgaggtcgactagagctgaatacgcctgcgcattttgttcctcgcttatgaagcggtcggtctggaattgcatctggctcctgtagaaagcgtcgaaagttgagtcgccaatgcgaccggtgccaggccattgcgtgtgaagcttcgcctgtggccattggttgtcgttgtttgctacgtcggtgaaaatatcagagaccgaatcgggggagccgatgtacccaatacttccctgtccgggtgaccagaaggagcgaccgcgtgcgggctgatctgagaggtagactgtgtgacccttggagatgaaataggatgcccatcctggccgtccgtctggagtatcaagaaaattggtgccggtctgagccgcgcctgcaatgaaaataatgggaagtggtgggttcaccggggctgactgaggggagagcttctcgacgtaaatttgccctatcataaccattgatgtagaattggttgcattttcctgtttgacgacttagatacgcgtcgaattggtgggaatcaagacttgctgtgatgttcgtgtatcgtccgccaacgtagagaacctcgcgcctaggaacaatgtccctaagctgggagccatgagcttgcacattgcctcctagagaagcgaaagcgacatgcgtcaaatatgtgagggaagccaaggtgcgaaagctcaacatattaacccaatctgcgaaaagtgaaaagagctccagctcgaatatgtagtggatccgtgtacgaaagggtattcagggtccaaaccccagggtgacaaccccaggttttggggtattttgatgcctgaatttccacacctgccttagtaatcaatgtacaccgcccggctctgctagcatggcataaatgaagcttttgatcccatacaacatacgaatccaagttcgggtttttgccctctagaaatatatatattgtgctaataaggctcattgatgattatcgacaaaataaggctaaactaaaaatatcgttgagatacaaatgcatttatcatgtggtttgcggtgacccggtcgcttgtgaaatacattaatgtaccacaaggtgagtccgctaggtgtagaacctctcaggcattgagggtgtcgaccggctccggctgtcgcgaccggaagcgcttgaccagattgctcgtgttcagcgcaaccagcttgctcgtcggcatcaagaacaactcgtcgatctcctccagcgtcttgtccttggtctcgggcatgaagaacagctggtagaagaagcctaacgcggccaacccgccgaagaaaccgatcgtcaggccggtgtaggtcatcgcctcctgcattccctcgaagttgtatgtcacgatgaatgaccataggtaaaggaatgtcgagcagattgccatgccctgactacgggtgttgaaatcaaagctctccgctgggacgacccaggtcagacacgaatacgcgccgaagaagcccatgtatatcacgaggccggagaagaacaagcccaaggcagttgctctgtgctcattgaagtaatcgacgccgttatttgtgtagaggtagccgacacccaccagcaccagaccgacgatgaacatgaggatgttttgtgcccacacgcgtcgtccgaatctgtccatggtgaacacggcaggaaccgttccaaagaacagcgcacctccgccgaccatcgacatcagcactgactcgcggtcactgaaattcatcttggccatcaagtttgacatgttgtacatcactgcattgatacccgtcatctgtccgaagaagatcattgccgtggcatagacaagcgcccgtctgttgcgcggctgcgtgcacacttgcatgtatctattgtaccatgcctcgctggtggtcgcgtcgacatcatgcttgactgtgatttccatcgcaatgaactcgtccaagcttttggggtcggccatatcgtgcagcgacttccacacctgccacgcacggccagtcttgttcttggataccagccaacgcggtgattcaggcaggaagcacattccgaccaagaggattgtcgaaaacaagagagacgagcccagcatccagcgccagctgcctgaccgcacgtcgaagaacacacctccggccgcgtatccaatgatctctccgaaggcgatcatcagctggtacacagacaccaggttgccacgcacctcaggtggcacacactcggagatgtagatgccgacacagccgccttcaattccgataccgatgcccagaatgaatcggcccgcaaacagcattccaacgctgcggcagccggcacaaagtcctcctcccagtgtgtaccacaaacacgagatgataatcgagttacggcgtccaaaatagtaattcagcggcgtcatcatgaccgcgccggccatagcgcctagcggcatcagcgaggaaatcagcgaaatgtcggttgccagtttcgggtcctcgaggctcgtccaatcgcctgaggcgatgaagtgcttgcggatgccaggcagcgcgccggaaataaccgactggtccaaaccactcagcatgccgctaaaggcggcgaagacacccagcgtaaggactagcatgcgaggactcttcatgtacactggtatttgtgcgaacgctatccggtcatacagtgattcgctgccgagatactgctaggcctgttgatcgcgtgcctcgatctcgtgctcacgctcctcgggcgtgaattcatcgctgaactctttgcccacggtgtcgggcttttcctcatatttgtcgtgcatttcgtgtggatcgtatcagtcatgcaacaaaaattaacttgtatgggatcagaagagaaagagaagagaaaccgacgagacggcccgaatgccgctctatataagggcgtatttcgccgaaaagcctttctgcgggatgctgtacttctcctcaatttccccgacattcggcctggaccccacaattcgccagtgcacccaatgagttccttgcttttctttctcgtaaaagttagtagcatgtgtatcaactagtattgttgtggggtttaaatacagggaatgttgcgtgtcaggtccaacatttccgatcgctaccccagcatccccacgatagcaattcgtctaacgactatcaagcccaacccagaccatcagagaagaagtgttcgattataacgagagtggaagactgggagctacgacctttcgaaaggccactaaatttcaggtcagtcaaaaaaaaatatagaccctgtccttctcatgacattttttggtaagaccggaatggtcggaacaccacgaggatgtttggctcgatcaagtaatagatgagcaacgcctcaaaactctgagacaactcaataaaaaacctccctcgccccggtcgggatgacctcggcacgggtgaagttcacggacttgtacggtgttgtacctaacaactgccgattcggacggttcggctagaccggggttggctggggcccctcttgtgcggaatacggagtagtagtttacggagtacggggtactccgtaaagcacatgatacagccaaacccgatcggcgccgagaaaagttcgcaaagccggggcgctatacctaattaggaaatcattgcgctcctctctatggtggaataaaccgggaccatgcatttctccaaagtgaccggggtttacaagaaagtggggtacatttcaacgaggtctgactgtacacttgtattattctggaattctatgtgtcatgacccggtatttatgccctgaaacgaagtgagagaactggaactaatcgtgtacatgtgcacgagacgttgcaaaaaagacatggcttgactatcgaatacttggactgagacctgttccatattttgcacggagtggctatgctttcgagagtcttcttcacttgaatttgcttggcattcaaggggcgcaaccgttcaaggttgcgatcattggctggaaggtctctaatccggatgtggcttgcgaaatgagcagattgaaaatgctgatcaacaatggcagccgcctctgacctcattgtctgtggttcctcgcttgcgttggtctagaagtggatattgccaacctatgtgctcattcatggtggtgtacattgatgtctgtcagctgtctaatcagaaatttcctagttaatgagttccctcgagtgtggcctgggggtcatgttgtgctaacttaagtttctcctgagaggttaccaatcacacattatgttgcccctcgaacaaactaggctaggtcgcccgttgcccaggaatagcttggtgaccgggaagcatatcgatcctcgaacccttttaagaggtcaccacatatgttagactgaccattacacgtacaatcaaactaaatcggttattgattcaagtataatcaaacggttcgtagctcatgcacatgtcagtgttgaccgacgaactaaacatgtgtggtgatagaactggatggcacctggtgagaatctatttactctaggccttctgtatttactctgaacaactgaccaggcgtttaatagacattattggtaatacagcacggaattctccaccgaaatctatcacacatcacatgcatttcttaatatactggggacgccgctgacgcacgcagttgtagcgccccagaacggctgccggtgctggcggccagctggcagaaaagggggagttgtatccggtaccaagaaggaaaagtcatctctatcgtgaatagtatcactctggcaaactccgccacatcctcgacatacatggccgctttcggtcagcttttgaggggaagtttctcttctagaacaatcgcaagtacctatagaacgccagtcacctatacggagtaatccatgccgaaatcgatactcaatcggcatctcacattgccggatctccacttagatatatttacgaagcttatgtccaacctcggtcttataaatcggataccaccacttctagaacaagtcgagcgagcttttagttctcactcctagggttcaacgtctatcctttccacgccgttagtcccaccgctaagagaagagtcttaggaagcgaactgtctcctctatatcagagagtcaggacgaacattccacagggccgccctttatgccattatagaacctagaacaatcagcgaacctagtaatggaagcgggatgttacaatgatgtctcacctatcctaaattcttacgtctcatatatctcttgagttttcgggctagcgtttctatcagagcgggggggtatatattacccaacgccactatgtctaacagcaacgtatgactttgaagtaatcttgcttcactagttacatttcatcggttcattatacatgctggtccttcgtagtagccatcgccatctactgactggggcatataatcaacaacgtcccaccgacctagtgctggtctataatcaaatgaccgaaattgacaggaagttccccgccctcactcgatggccttgcagcatagacaccaacccataggtcctttatattttcctcttcaaaaacccaagtgacctcccggataggagacttttccaagccctcaacagaatagatccacagacttccatcctcttttttaactagttcaagagttgccgtaccactacccatggccccgggcactggaagcaagctccagtccgcccaattgtctttcgcaacgacgctaaggtggggtttaccgtgggtgaattcaataccgcacttcacccacttctgccccccatcggcgctatttaggacaaggaccacaccgccctggtcatatttcttctcccaaacggcattgacagcgacgcggatccgcttgaatgacatgagaggtatagatttgtataagataggggccgagaaggagatggtggaaggcggtttagcccatatatccgtggaagatggtgctttgatagtaaattctaggggaggagaaccgttgcctggaacttcggcgtccgagttggcgaatttgaattgggattgcgacatggtgggccgtggaatgcgacgaagcagttgtataatcaaccactgatatttgaacaatggtacaagtgaaagattgaagatttgaggaagtcagcacagagagtcagcggaaagataaatgactttgtcctggtgcgagcagaagagacacgatgggaagggctcgaactggcctgggggatgaggtatatcttgtataaggtctcacatcagcctgagaactattaggaagactgttatccaaccaatgatgtttaaacctatctctttcactgcgtttaacaacaaaataaatgaataaattagtttaccatagatggatgatgcttttggtgcgcatcgcgtatcaaccagactccgaatcctaatagataagccgcctgagatctcaattttcataggccctaaggttccacgagcccaccttccatattaggcaattccacattggtaatagttacaaggaggaccagaggcatacaccaaggcaagtgccgaaacattcaatttgggtaatttgatgagaacggaatacgagatgaaaaaagaaagcctattgtggaaagagggactccattttagaggcgtgctaggtgaaaaccaattgttttaaatgcctttctgtcactacagtcactcttatagaaaagccatactggtttcaattcagagttagagcaactcggtcttcactgtcttcacaagaagcaattttaggacaaagaacattcgcaatgcctgagaaaactgtagtcgtcattgggtgagctttttccttgtccggaaatatttgagagagcacaaatctgacatatttgcaatattatagtgccggggtagctgggctcacaaccgcgctgctgctgtccaagtgcccaggctataaaatcattgtcgccgcaaagcacatgcccggagactacgacatcgagtacgcctcaccatgggctggagccaactacatgccgtaagtaggaataattggccacggacaagaccgtaattgacaagatttagtgtctcgattcgcgggacagaagctgcggaatgggagaaagcgacatgggcaccgctcgaagacctcgcgaggaaccatcctgaagcgggtgttcacttccaaggcaagttgaaggcttgattttagtcagttagcagtggcatcgactaatttgattaaagaatgtgagattcatcgtcgcgaaaaagatgccggctcggcaacggcggattggtttgctgagctcctatctccagagccttggttcaaagacactgtgccagatgtaaggaaacacttcttcacctaatatcatgttttcatatttaccagtttgattatttagttccgtccgcttccaaagtcatcgctcggccccggtgtcgatgcaggaacggtcttcacgtcggtctgcataaacacggcgatatatctaccatggctcgtgtcccagtgtcttaagaatggtgttactttcaagcgcgctgtgtttagtcacattttggaagccgcggggccgagcgtctgccccgggaaggtcgatttcgtcgtcaactgcactggtctcatggcatcgaagctcggcggcgtgaatgacaagactgtcattgcggctcgtggccagattgtggtggtacgcaacgaggctggaaagatggtcgatgtttcgggaaccgacgacggcgatggcgaggcatgctatgtgatgacaagggcggctggcggagggaccatcctaggcggttgctatcagaaaggaaactgggactcccaggtagatccaaacctcgctatcaggatcatgaagcgggctgtggagctgtgtcctgcgctcaccggcggccggggaatcgagcacctggacattgtccgacatggcgttgggctacgaccagtgagagaaggtggggtgaggattgaaagggagcgagtaggcgatctatggctggttcataactacggcgccggtggagccggataccaatcgtcgtacggatgcgcgcaagctgccataagactcatccaagacgccgcggggccacagtccagattgtaaaattagccagtaagaccaagcaagccactagttagagttagcatagctccactaatagctaagaaatcagtcgtctcgccacattagcgggggagttgattggaaacccccagttactatctttcttccttatcagtcacctccgtacaacatacgtcctctcgtgattatatgtttccttccttgtaaactaatttcaaccacacggcatgggtccatctgggaatcgcactaattctctcgcattcgccaagaacgattgccacacttgtgcggctcttaaagaaggctgcgaccgtcagcgccctcggtgcggcacatgtatatcaaacaggagagcatgcggcggctttgccatggatctcgtttggaaagagctgccagttgttaatcatgggccattgcccagaggccgcgaatctggatgcagctccaagagagatccgcagcacaccttcaagttcacgcaaggtcgcccgaaaatacggcggaaaccgaggcaatcgaatactgtttaccagtcaatattggatctgggtctagatgattccctacgccatgatggggcaaactttttgaatactactggcaaggccagcctatcatttccttcgacacctcaaccatcgagtcctgaggaactgggaatcagcaaagattgcagtagccaatccaatgagtatatgatctatcagctgcaaaatgagacgcatctgtctccaggttgggaaatgggattaggaactatggaatatgttgatggaaatccgattgatgcatcctgcccagacacgatagagcaggctcagcttcctacccaacttactctggacccagaccaagaaacttcgccgggcattattggcaatctaaatcaagcgggcggtgacctcgctgaagagctgtttcctatgacaaatcttgaaagtttatcgaattgggccacagaacaagataccgataatcccgtgctcgaggaagatatgcaacccatatatccaataaaatatcgcaacctagctcacaagtatgagccaattctcgctatatgtacgtatacacacttgcagattccttgcaacgtccttcccactaaatatttacagacgacgagaaattctgcgtcatgccgctcaccagggattgtcgtatcaaccccttcagagctcagactggaagtctcgaaaactacgactttcttctgcatgcgattgtagccctttctttccatcacctctcgaagatgaacaacaccgatgatttgatactcgaaatgcaccatcaccgatctactgctcttcatctcttcagccacgccttaagccagccgacttccctgccacttcttgataccctcctgatactcgtcagtatagaggtatattttgccctataatcatttgctggaatataatctgacatatcctcaaggtctgccagtccgcgttcggtgcgtggggagtacatctgaatggcgctcaaaaacttatcacggaacggaaggatatggaaagaggtttctgtgattctcgcatgcgtgcgcagctggcgatgctcatatggtatgtctagacgtcttgctcaccctgaccatcgttctctgttccgtctgacacctcggcaggtgggacacgacaattgcgctcatgtctcgaaccgagcctcgtttgccgttctccttgttggagagactgagagggttcgatgacagcgatggatggtcctgcttcggcctaaacgggtgtccgtttgaactgatctccatcatggcgcgccttgcaaagctggcatgcatatatcaaaggaccatccagatggaatggaccatttttaacttccgccccgtcagaaccataatcgctgaggtaaaagggtatgtcaacaaagagaaagtcgaatgggacgaattgaacgacctttccgaagacttcaatttgcgacgcaatcggtactactgcatcgaagcatggaggcatgccatattgctctacatctatcgtgtcttcacgaagaagcccgacgatcgagaactccgcatgattgattacttttctcgtgttatacttgactgcgtacggtgcatgccgtgctcagacaccacccagaagcaggttctcttacctgtgtttctagccgccgcagaagttggcgacgaaaacacccgttctatggttcgcgagtattgcaatcactggagagatgtatctcgaatatatcatttcgaaacggcgtcttctctgttggacagcatatggaaggactgggatccttcgacgagaagttcatactggtggggactcaaggttggcccgcaagattggatgacgggagatgttaaaggtcaatctttggtgtttgagttgctcttaggatgatcataggatttttagtgtatagctctttaacgacaagattctagtttctcattccaatttgatgtagcagaaatatctcctttttgtcacattcacagatagaaacatattcttaggctgatcgctacaatttccattatcttagcagatatacgaggattcttctcctcgttccttccaaattgtacttgacgtacaacaggaacattgcattggtgtgggcaatgacttgcctgaaacagagcgagagccgtcccggagtacgtcccggagatcggttcatgagcggaaatactataatccgctccaatataccgacagacttccctcccatgtctatcgtcttgaattgagtactctttccaaagacctagctcgcatcagacaaaaactgctcagagtatatcatatataaatcaagtgatttcgtgaagcttctctaggtttatatctgcatcatgacatgcaaaacatattggcggagagtaagacccaaatcaactattcaacttattgtggatcattggactatagagaggttataagtattttcgatctctaatgtacaatataggaaaacaagttggctgtgggtaaaacatgaaaatcatagtcagccaacagatcataagcacggatttagtccctttctagcttcacttcgcccttatatgccccgatatccttttctttcacgccatcattgtctaccaagataccttcgatagcttcttctctcctagcgttgagcataccgaagtcgacccttggtcctttgaaaatccccttcttggtggtatgccatagcacaatcacaaagcaaacaagtccagtacaaacgactgacacataactcatattctcgggggtcacaggtatctcagtggggaaacagtagatgatatcgaggaacaccacccacaagactgaaatcgcattgatagtagacccgtactggccgagatcaaaatagcgtgctggaaggacccgatagcggccgcgccatagcaaaacagcctgaggaaggacgcaggacgtttgaagaaacacgacggctgcgttgaccatagccgagaacgcagtggaggatccaaggaagatgagtccatatagctattgaagttgttaactgagagtgaacaaaaagggttgagaaatgtatcataccgaaacgaataccgcagataatagaagagcatggatgggaacttgcattccaggatgtacacgttgccaatacccagagtaaggcagcgctccatcacgggaaacggcccatattgtgcgtgatgccgtagtagctgcaaaaatatcgtcagacaaacttcaaataacttttcacaaccacataccattggccaccaagttactaaagaaaagaaaggcgaagaaagccatgagaatcgaagctgccactcgagagcccgttccgttgtagtagatgtcaaacaggggaaggccggtcacagtgtggagtactgcatcaatatcaggggttgcgtatagcagagccgcagcgaagggtaaagttgtaacaaagcctgctaggagcgggtagatcatgaccttgggcacattcttagacgggttaggaatctcctcgcacatgtgagcaccacaatcgctacccagataggcgaaaaccgagtttgccacggcgagcatgaaggcaaatccatcggaagaccagcccgtccggttcgtggtatcggtaaagattgcagagccagaggcgtggtccttcgtgacgacgaacaacacaatcgtcgtggaggtcagtgtcagcacggccaagacaaacatcagcttgttataaagaggaatccagtttgccatcaggatattgatcgccgccgccaaccagatcagacagacataaatcagatacgcgtgccattgctttgggtcatagtccggataccaggcgacggtaatatcgagaaccatggaggcgacgaaattggcgacagatccagaagagagccaccaaccgatgacactcatccagccgtttctgaacaaaaaaaaaagattagcaagatagattttaacaggcagttcgaggaggagatgcaattacacaaatgaagcgaagggtctatagtcttctcgtgcaaccataaaagaccagtagtactgggcacctgcaactgggtatgcagacgctagctcggccattccgattgaaactatcgttgtcatgaccccagcaattgggagagcccagatagtaccgcctgaagaagcctctgtcaaaccgataccaatcgctgaaccagtgcctagccacgtgcatgtcagggtaaaagacaaggctcctagagaccatttggagaaccggcgaggcatagcggcctcatagccagcggcctcgagctcgagatcatcaatgttcgtcatagttcagaagcgtccaaagaatgtagaaaaataactgatcgaaaggatattgtaaggaaagaagcttcgtttttaactcttagctacctgtgtagatagttatcagccgttaccgtggtgcttgatgtctcttcgcaagagggagataagagagcattctaggcatctgagaaatgcctctttccattcttagaaggagatattgtacttgatcctagatcaattccatactgtgatttgattatctttgccttcatgtcttatcgtggctgacaatacgaatgatcgaagggtgcccagaagcggaagtacccaattaggcaagcgggcttgtctgcgttcccgctcggctttgtggcgaatcccgaatctcggttctgcctcctgcggtcgaatcacatcccacgcagacgacccatcctattctgccgatttaggaaatcgaggcccgtcatgtcgtcggagataagcgctgtcgatcgccaggattagcaaaatggcttccccagaacaatattatactgctttaggaaggagaggagatcagcagttgggcctcggcatcagaaccccctcgcagccattaaagcctatttaaaggtgtacctgtgtgacggttgataacaccatcttctatcacaagctctcttcttcttttctcaactccgtgtggttgtcttttaccctctattctccaaaatgacttcgatgaatgaaatcttcggcgcctacgctgcacgaaaagctgtgcttgaagccagcagtaatccctttgccaagggtatcgcctgggttgaaggagagctcgttcctttccatcaggctcgcattcctatgatggaccagggatttctgcatggcgatctcacctatgacgtgccatcaatctgggatgggcgtttcttccgtctcgacgatcatatttctcggctggatgctagttgcggcaagatgcgaatgcagcttccgctgccaagggaggaaataaagcgcatccttggacaaatggccaccacgagcggaatcaaagacgcttttgtcgagctgatcgtcactcggggcctcgttggcgttcgtggctctacgcccgaacagctcacccagcagaatctctatatgttcgtcctgccatactcctgggttatggagccagagatgcaatatagaggtggtagcgccatcattgctcgcactgttcggaggacccccgttggctgtttcgacccaaccatcaagaatctgcaatggggcgacctgactcgcggaatgtttgaagcctcggaccgcggcgctacataccctttcctcaccgatggagatgcaaatctcacggaaggctctggattcaacatcgttctcatcaagaacggcgttctctacacacccgagcgtggagtcctcgagggcgtgacccgcaagagtgtcttcgatgcggcacgcgctaatggcattgagttccgtgtagaaatcgtgccggttgagtcgatatatcactgcgatgagcttttcatgtgcaccactgctggtggtattatgccaatcaccgtgctagatggaaagcctgtgaacaatggccaggttggtcccatcaccaagtgcatctgggatcattactgggcgatgcattatgattcgacctacagctatgctcttaactacgataactccgagaagccatcagacgctgggcgccagcagagactttaaatcaagccttgcaattggtcaaatgtacttaggaaaatcagttagcctatatgaaacttgtgcggctgcatccttatcttgttacaagagtagtagtaaatctcttttctcgtctaaccattgtgtcaacgctcttccaaataggcacgtattgtctaaatctccgagtctcgcgtcgaccttgaacgtccacatactgctcttcaaaaacatcgtaggaatctggaaatctagtaatatgttaccacggccgacctgaaattcacagacagcgcgaatagtgaggtacgctatatcattgaaggacgtagtttttgacggcaatataacggctttttcgtcgtcgcaactaccatccgagtagacgataaagctgctcacagagagggtcgcattgacgaagccctcgtcaatatatattcaacccaagccacaatctctgaaatagcgttgaactctcgcttatctactttgggacattgcaaatacgagcagcgagcaactagttaatcacatttttactactataaacaccctttaatcatcgtacaaaagtgactagattgcccaataaatccatctcacgaggaaggctgcccaatttagcaaagccgaatccttcaatcaaatctttctcccaaccacgacataaacatcgaagcaataatagcaacctaggcggtgcaagtcacttagcatagcctccctcagacttacaatctgatccatggattgtatttcattcaacttgtgcattttgaaagcagcagtcagaacatgctggattccgacaacgaccgtgagattgaggtcttcccgcgtggccgggttgtcaagagtgtagatccgctcttcacaggattccagtccagatttctggaaagtgccacgaagggtagcaatactaaagggagttagcctctctatttagtccctggtagtcaggcttactttggtgttttcccaagcgaaacaagagtcctaaggaataagtcggttccatatcgtgcatcagtggctcgcttcccctcgggctctcctttgattgcacactcatgtgcggcacaatctatccactgtaaataacctcctggctctgctcggtattacgttagatcttggattaatcgaagctaagatgggaaactccgtactgagaagcgtcatcaagtttcgcacggcaggctcccactcgtcagaagacaatgccaccaccatcactcgaacattgacgacatcgtattctcctagatactcatctgggaatggctcaagaaaattttgatgatggaaggtgatattttccggcaaggcatccttgtggggaaacatgacgtctgagaggtcaaacccgtcaagctgacaagtacttgggagggcagctgcgagctcacgtaaccagatccttggagaatagtgttagggctttcttctcttaatggagttgttactcacccagttcctgtaccgacatctgcaatgcgcatacgatcatgttgtttgatggctggatgaaggagatacccaatattggcttgccaggctttatattgcatattcagtctgtattccatgttaatattaccagagggttgaattgctgctgagttttccacctgtcgcgttcggctatgttcctaaccagtaaatattcaccgtgagattggacttggtcggacatttccaaatgtcgaaagcgatatgatcttcaaaaggttgaatcagattaaatccgagcaaagttccagcagtataagctcttttataatggcgagatttagctttgaagggcggatttgggggcttggtggcggtagtaagcataaatgttagtcaggcctccgatccaggcctcccatctaggcctcccatttcggccccatgcaggattctattaagttatagacctcgaacggtctctgtctctgcaacagccaactagctgagagtatgttcagtcagcggtggtagatctcgtattttttggagtacttatatgacccatcaaaccaacggcacctctctagggcccgagcgattgagctgagtggttggggctataacttgaactcacatgtgcggaggtgatagacgtcatcctggtcatcaattgccattttcaccataaagttcacgactcggtgtgtattatcaattctagcgcccaatcgcgatgagggagcagcaatgcccaccccggaggtgtatggggtgcaccttactccactactaattactgtatgtcaatgtagcagggccttgggggttgatattattactactattgctgtgtgcctcaaatttatacccaagcataaaaagtggaggtctgtgaatagtcgcgccgcgaagccgaggcctatatgatcttctgatatcctgtaaatatcacaaaatgaggacttatatgcagttgtggtgactagtatcaatcattgactcgccctttcgattcgaaaataatcattgggcacttcccctcgattcgtctagacgctattgtgctcgttccagctttgtttgccccatcctctttgcctgtcttcttgtaaaaaactaaccttacggaatattattcaatgcattcaagacactttagtgtacttctcatctatctctttcgatcaagactccatacctaaccttggcgccgatcactccacctgactaagagccgatcttggcgcgccgaaatggatcaaagtcgcgtccctcaacaggacgccgaccgcgtggccaccatgtacggcgaactcggcaacaaattggtacgtgggctatagattcatcccgctcttgggcatttatcatctcaacacagaccgaccgtataatatcaaaacaagagaaaacgaaacccgctgaccaacaactcacgcgcaataggtccaacacgccaaacgcacccaatccctcgcccacctacccccataccaaaccgaaatcgtgcgcgcagtaacccgggaagtccgcgatctcgaccgcgatgtcatccgtctcctagcacccttcgagggcgcgttcaacccctcagccgacccagccatcgcctgcgcgctcctcgtcgaccacctgtgcatgcgccggaacaagcgctgcctgcttgcgtatcaccgcgtgcgcacagacaagctcgaggagctttgctggacgggcgtggatatcctcgagcagcagcagccgtccgatgacagcgcggcgccgcagcacacggctctcggggcgaacgggcatagctcgctgagtcccgaggaggaggagtatttccgccagtacggggatatgcttgctgcgtataagggccagtggacggatgttgatttgacggggacgctggagccgccgaagcatttgtttattgatgtgcgggtgttgaaggatgctggtgagattcagacggaatatgggtatgtttcttttcttttgtctcctgcattttctgggtgttcggtggctaatttgggtttagggtgatcaacttgaccaagaacagtcagctgtatgttcgtcaaggtgatgtggagcgtctgattgcgcagggtttcctggagcggttgacttgaatgtgagccggaactacctggctgcttcgggttttatatgagtacaagaattacatgagcaaaagaaatatgagttagcgttggatatctacagtggttttatgacgggaccatggactttgagatacccccgccgttaagacatcggccaaaatgaagattttctgcattgccatagtgcgagtctaattatgtatgaccgttggtttgatcaatagcttttttactcgaattactctctagggctagattggcctatggtaaaagaccaattgaagcgatgaccataactagttatctcgttggctggcgttatgcaaggaaacaaggctgcggctgcatgtcaatgccgatcatgcggcgcatagcactgtgttccgaccacggagctgtagcatgttgtatactatttctattacgtatgattatcgaaggtctagttagtctagagttagcgcaattgaagagacaacctattatatctctcgaagacccgttcccctccgctctcattaatacggtgaaatgctacggcgtactccgtagaaatacccattagtagtaccatttagcccacgatcgacccgaccgcacttcccctctatgcttaatagaatagatcaatctagtcgaccccactaatttaaacctctatcttagcctgtaatgcatggaactagtagtcattgtaggccgatgtactccgtgatagattaattaatcaagccttgcaacctagaaaactaggcacctcaaaaagtgggggtttgaattggtaacctggggtgtcaaccaaagggttgacattgtagtctttttagtagaacgttggtaggttcttcctgattgatctaaaagaaaatgggtaagtaagagaatggtgaaagagctatagcaactgagaggtaactgagagcaaactctctatcctaggccttaccctaatttagtcagtcccatcatttactctcactgacgagttctaatcctatacatcgcaccgtccttcttctctcactcaccatgccgaatgtcctcacttccatttctgtctcgacgggctcatccatgagtacaacttcagtgatacagtttgacaacctgtctgcctttaaagctcacgtcctctcctccctacaccaagtcgaaagctatcacgactttttatttaccgacgtgcctgaatcctgggggggcggccgtgttccagcgtattgacgaaaagatcccttctcggtaagtcaaagaccttctgcatctaattttccttgactcttacccaatatactaggaaaacccacaatacaagggaccgtactctacgggtcaaagtcataccgacagaggtacaaaattgtatccagcactggctagtgcagcagatgatcgactggctcttgaatcataacataacgcaatatgaacaaccactcttacgtgtggcagttggaacaagtaagtaccttacaactcacttacctgcacaggaactctagaaaagaacccaacttctttttccgagtcgaggttcatatcatgccagctattgcggtagagtgtggctggagcgagtcgattacacgactttataataatatgaacctgttactaatgggtggtgatggctctattagggttgtcattatcgtcaagtggagaaagctgcaaggaggtgtctcggggactgtcgagctctttaacagagaccgaaacgatatgcccagatgtgaacaaagcgaagtatgtccggatttctgattaaatatcacatacttattacctggaatctgtgcagactatcttcccccgccctgccactggaaataatcaacggctagggattcgacgacgtgatatctttgggccggcgctattagatgacaacagcgggaatgatatcctctacctggatgtcgagcgactgcgtggttatgccgccgaatcccttcacttcatgaaccttgttccggcataaatatcttcttggttgattgtatgcaactaattgattcctttgtcttgatacattgctgctactatgactactctctctatagtaactgtaaggcgatttactacaacaatacatgtagctactattgagagcataggtgaaacttgagagaccctaatatatcatgtgatgatatcttatcttatcttatccgcttaggtcagccgagtgttggctgtttgcgcacgggcctaccgcctcccactatcttcatctgtattagtccggatccggtttagcgcgcctattaagagataagggacgtttagtcaaaaaaccttggaactccgatacttcggatcttttctatctggtctgttgctaattcagatttgtgttgataggtaacttcctttcacttctatataattcactgagccccccttgcaatgttcatctcggttgcgtcatctgtttgtccaaacggcccaatgcgttaagtggccccgtttaacttccgaatcctaaattttcgacgcacttggttggacagcaattgcgcgagataccatggcggttttgcagcctcgtggccgtcgcgactctcgtgcatcagcgctatcacgcaatctgatgtttgaccgcgacatccagggtaacgccccatcagaaacgttggtggaacatgcaaatccaggtagcccgcccggtccaatgggagcggaatcatccagctacaatggatcaacgacaagaacaccaaaccgttcattttaccaccggtccttcaatagcaatatgggtgggtcattgtggtgcatacatagtgcacggctagagatacggcgcaatttttactgaccattcgacctatcacagatccggctcattatgcttcaggtggtctccgtgaccagactgcggaactcgctacctatggcctttcgctgaataagaattccctcttgagggacggctccggcttacctcccacccttgatatattccacggcagacgggattctgcaagttactcccaggacgaagctgcaaactctcaatccgcagcgggggaggcgttattggagccagggtatccctcagttgaccctgcttcggcttcaggcccttcggccttgacagagatgattcgccgtcctttgacggatacggaggaggaccaggccacacaacccgggaccgatgatatctccttccccccaccgatgatctatgcggaacccgaacgagacaatgaaagcacctcgttattatctaaatcacgatccaaatctatacaaaactatggaagtgcaagtgacgctgagaatcaaagggcggctgcacaacgatctccaaacttaataacgaaaggaatttcatccgtcacccattatactcggatcttgtcgaacccaaaggcatgggatgggcgagccatatggaaagatgctgtggtataccccgcaagtctggttcctgccgtattactgggtctactgctcaacattcttgatgctttatcctatggaatgatcttgttccctctgggagaacccctgttcgctcacctgggaactgacggtatctcgatgttctatgtcagtaccattatatcccaagtggtattctcctgtggaggctcgatcttcaaaggaggaataggaagtgagatgattgaagtagtacccttcttccaccagatggctttcaccatcatgaattcagtcggcaaggacaacccgaaatcagtgattgcaacgaccattctagccttttcggtcagttcggttctcaccggcttggtgttcttcttaatgggtgtatgtgggctgggctcactcattggcttctttccccgtcatattctcatcgggtgcatcggtggtgtgggctactttcttctacagactggaatggaggtttcagcccggctccccgggtctctcgagtacaacctccccacgattcagaaacttttcactctcgatactttccctctttggatgatacccctcttccttgccattggacttcttgttctcaaacgatttgttcgctcgaacttccttgtcggcggatacttcattgccgttgctgcagtgttctacattgtcatcttaagcgctaggatttctatgggcgctctgcgccacaatggatgggtctttgctgccccgtcttcgaacaacccgtggtatcatttctattctctctatggtgagtcaattggttgtaattcttctggcattccatgctaattcattccagatctctcggcggtcaattggactgcctttggtgagacaattccggccatgttcgctttgacattctttggtgtgcttcatgtgcccatcaacgtacctgctctcggcatatccaccggcgaagacaatctcaacgttgacagagagctcatggcacatggcgtgacgaatgcactttcaggattcgcaggaagcattcaggtatgtgaccccatcgctagagctgtggttaatgtgctaacggaagcagaactatcttgtttataccaacagtcttctcttcattgcaagtggcgggtcatctcggttggctggtctgatgttggccgcagccactgcagggattatggtcattggcccagtaataatcggctttattcctattatggtcgttggtgccttgatcttcttgttgggcattgagcttttgcaggaggcattggtggacacatggggaaaactcacccggcttgaatatctaaccgttgtcattatcgttgtcactatgggcgcttgggacttcgtggtcggaatcttcattgggatcattttggcctgtgtgaactttgtggtccaaacgtctcggaaatctgccattcgagcaacattctcgggtgaaatttccgggtcaacggtccgacgtcctcctatccaacaggagttcctacgcgaagctgggcagcagaccctgattatcaagcttggtggatatctcttttttggaaccatcgtgaatgtcgagaacaccatgcgtggcctgatcgaggaggaagctttcgaccgtcgtcccattcgattcatcattctcgattttactcgagtctacggaatcgacttctcggccgcagaagcattcacccgcatcaaccgcgttcttcaaaagcgcaacgtacaaacggccatatccggcttggatgtcgaaagtgacgtaggaaggtccctacaaaatgtaggacttttcgagccagaatctggcgtccctatcttcgaagacctgaactcagcccttgagttctgcgagaacaactacctgaaagtcttctacaaccgccagcaagcactttccacacccaccgattcaactgcaaactccgagctcctccaaatccccgcctcagtccccgtgccctcaggacccaaacctatcaccctaaccgacaacattgtcagctcaccccgccgccagcacctacagcgcgtggcgacctcaaccatccaagcccacgaaacaacaatgatggcctcccccgcctggtccgccatgcgccaaccactcccactcctcctccaaaccttccaaggcctctcaaccgaaaacgaagacttttggttccccgcctgcgcctacttctcctgcgaatgctaccccgccggcgcagtcctgtaccacgaaggcgacgccccgcgcgccttctacctcctcgagtctggcatgctgcgcgctggctacgacctcccacagggccgctacttcgagctcattgtcgctggtagaccgtgcggcgaactgcctttcttcagtgatacacgccgcacggcgacagtcaaggccgagcgcgattgtgtggcttggtgtttaacgggggcgcagtggaaggtgctacaggagaaagagccgcgcattgctcgtgaactgttgacggttagcttgaagttgacgactgagcgcatggatagtatcacctcgtatgttttgacgatggcggcttgattttctttttagttggcttgttcgttgtttgcatctagcttggtggttatctgagcgagttgttgggcctcgtttttaatgttgatattcccatattccccgactctttggtttacatatgcattcgtatatagcagctggagcatgcatgcatatcgacctcgtgatgtttttatgatcgttgtatgtagcagaacttcgccttgcacgcatgtgggtagttgtccttgtataattgaagatacctgattgattgcgacaagcagctgaaacttttctgaaaagccttgggcctattcaatgaatcgaaaaagataatgcaggagatgtatgagttctttgagtttttcacagatgatgtccgaaagaagaagggggggtcaagtatgagaaggcgtctagttctgtgatgcatcatgttaaatttctgtctttcggccgaaaatcagtctcttacaatataatttggggtgtttcctttgttaatgctattcttctttatttcttgctgtagatccaatatctcaattccatcccggcgcgctacggtgcacgtgatccggcgttcctgacacgcgtgggcgcgtccctgattgcctcattctagtttcacacttggatgtgactctcttggagatttttcaatcaacagcccagtctttaatcgcatattttatctacaaatttggctatggcagctgaaaatggagactcaaagctcttcgagcagtgttgcttctgtattgtatgctccaaggatctttcgaacgaatccgcagaacaggtacgtgttttcctgccactaggacagcctgaactagactgacaaaataaactcgtctagctagccactctaatcgagcaaaatggcggcgagcctctgattgtccaacccggtgccgaggtccccgatgtggccaagttcagccatatgatctctacaactattgacttccaagcatacggtactgcctgcgatgcgttgatcccagtggtgaagccacagtgggtgaataactcattgacgaagcggaaactggccaacccccgccaatacagcccagacccgcgtctgttcatgaacgatgtggtggttacctgcggcgacatacccgagggagacaaggatgcaatcatagggggtgtagttgcgaagggtggattgtattctccaagaatttctcaacaggttacacatttggtggacctcacggccgactccgacaaggcgcgcattttgcaggcgaagagattaaacgtgaagattgtactaccacactggtaagtttcatggtacaacagccagtgaccctcgctgactgagaataggtttgacgactgccttaaacttggtcgacgaatcgacgaacgtccatatacacttccagacccagagattttgcgcgcgggtcctgatactccaatccgatggcaagataataaggacttggtcggtgcgtcgacaacaaatccttctaagttgcctacgcctagttcggcgcatcaatcaggccaacgcagtgtctttgaaggaaaatccattatgttgtctccggatcttgcaatcggctcccacttgcaggagtcaatccaagccgtcctcgaacaaggcggtgccaaagtgacatcaaatattgatgtagcagacatgttaatttgtcgttaccgggaaggattttcatatcgcacggcatcgcgactgaacatcgacgttgggaatctcgcatggctctaccacctcatgaccttcaacacatatacttcacccctcagacgactactacactacccggtctctcgcactggaatccctggatttgagggtttgaaaatcagtttgtccaattatgttggcgaagcaagaatttacttggagaatttgatcgcagcagcaggtgcagaatgtaccaaaactttaaagcaagagaacacccatctgatcacggcacacggaatgagtgagaaatgcaatgccgcgaaggaatggggcctcgaagttgtcaaccacttgtggctggaggacagttatgcaaaatggaagctccagccggcatcaaacccgcgctacagccacttccctctgcgaaccaatctcggagaagtcgcaggccagacgccgctcgaccgccatgttttggagcaggtatttttctcgtccgaggagaatattgctcatagcccacggcgcgcaatgcagagcaagaaccaaaatatggtttcggtacagcctcccgctgagaagaaaaggaagattgatgaggatgccccggaaacttcgctcgggactccgcagggtaatgggaagtcacgccgacctattcaaacacccgcacgaactcgagtcatgtccgaaggcaaagaaaatgagacaccatcgtcgaccagtagccgcaagtcaaaagaggcggcagctgcccggcttcatgagtatgtcccggaccttgcgttgtacgaaaaggaaaggaaacgcgtggggggtgttatctacggtggcaggcgaaagtcagatgaaggccgggttcaggagaacaaaaagcgtgcctcacctgaagctgaggatgagagcgatggcgagcaagcagtggagactaaacgacagaaaaagtcacggccaccaattgctatgcacctcttgattactggatatcagagatgggttggtaagggaaacgagaagaaagaagatgcagacaaggttcgtttaacgactgaagttatgaaaatattggcttaggatctatctattgacactttcacagcgagggcttcgagatctcggtatcatggtggtccaagatgcccgacgatgcactcatttggccgcaccgtcgatcttgcgaactaccaaattcgttaatgcactcgcgtatgcgccgatgatccttagcacaaagttcattgacagttgcctaaaggaggagaaactgcttgacccttccgatttccctctagaggataaagaagccgagaagaagtacagttttgacctgtcttctgtcacaaaaaacgcaaagaagaacaagaataaaatgctgcaaggctatcgcatctactgcgtcgaggacattcgaggcggatttgatgccttcaaatctattgttgaaacaaacggaggagagtgcatgctttaccgtggccgtctggctataaagaaccattctcggcgggaggagagcgacgaggaaagcgaatcggaagatggaagccctgtccgcaaggatgtcttcctcctcagcagtactggagctaatcacgctcgagtctggcctcgattccgccaactggcggtcgatatcaagaagactccacggattgtccgggttgactggctcctggacatggccatgtcgcagcagacacgtgctgccgacgaatacgagctgaccgatgagatgatcgagacaatggaccagtagaccgataccaaggtattgagtcgacactctcatccacttagggctttcaacctaagaacatggattctgtgtataagtttggagtatcggcgacgtgattaacatgtcttttggcctgcacataggaagcgctttgtttatgtcacgaatagccacgatttatctcatagagaaatcccagcatctcatcttgagctgttcaaaagaacttgacaccctcctggccctcagcgccaaaaatctgcgccctgcccctcttaaccaggacattcagcgagcgcaacatgacatcagtatccatgccatggaactctgtagacgcgaatcagcacagtccgtagacattatcattcacaaccgaagacacaatctcaccctgcgacattgctccctccccatgaataagctcatacacggtcagaaccgaccccctctgcccagtgccctcaacccactcgaccaacacatccgcccactcctcaggcctcctccaccaaatccacgcaacagccttcggcccttgcccagcaccatttcccaacccccctaaagacgacgcgcctcctgcatccgagatccactccgctcgccgcccaccgccgccttcctcttcgctcttagtcatccagtcgatgaccgcgcgggcctcgcgcagatcaaggcgcttgcgcagggccgtattgtggaatagcggtgtttcgacggcgtcgattagggagagacggtattggcgatgatgccggcaccaggattggatcagagaggaccatttctcgagctgcgagtggcgggttgttgtgtttggttgcggggtgaagaagggggggaagttgtaggttggtgggaaggggaagggaggtgttgttgtcatattggaagggattaaagagtgaagattgaagagcagatagctaaatggaccaaatagaagtagaaaagttaagacgagtagaatgtcgagaacaagaagagacaagacggtcgagagactccaagctgtggagtaaaaggtggggcccgggggattttctcaatttcgacttcggcctttggatttctctcgactgtcccctctgctcttcacaatggccacccaaaatccgcctgcaaagcgcaccaagcgcgaagagtaccgtcgcaatgtacaggcccagcaggaatccaccgatggctccgtcatcaagatgccgcagaagaaattcttccgccagcgcgcgcatgcgaatccattctccgaccaccggctagaatagtatgtatcctatctgcctgtttcacgttaaactgctgctacggggtttcacgggattctcgagctccattggcgacaattccttcgcatccgatcgaagactgatagctaactcacaccctaatagtcccctcagccccgcgcacatggactggtcatcccatttccctgcatttgtcgatccggatacatccaaaacgaacctcagcggagggcggaagttgaccaaggaggtcgaagtcgtggatatcggatgtggattcggcgggctgatcgttggcctggcaccattgatgccagataccctgatggttggtaagtacagcgcagcgatattccaactcatatatacacccggccgaatgagcaccgcaaaactaaccacaaaaccacaggcatggaaatccgcacctcagtgctggaatacgtcacctctcgcatccacgccctgcgcagccaacaacaacgcctaaagaacaaagccgcgaacccatcatcaaccgaaccccaagacgcctcaacacaacccgaaaacaccgaatcagccccggccccaaccccagccaacgacgatgaaatcggcacggagaaaatcttcccaggaaacttcgaaaacatcgccgcaatccgcagcaacacaatgaagttcctcccaaacttcttcggccaccaccaactctccaagatcttcatctgcttcccggacccgcacttcaaggcccgtaagcacaaggcccgtattatctccgagtctctaaatgccgagtatgcatttgtcctgcggcctggcggtctgctgtacaccattaccgatgtcgaggagtatcaccactgggtcctgcggcatttcctgaataatgagcagcaggagggtgaaccggcccctgctccgagtagtaaggatctgtttgagcgggttcctgatgaggagcttgctcttgatccttgtgtgcgggttatgaaatttgagacagaggagtcgaagaaagttacgagaaataagggaaacaagtatgttgctgttttcaggcgcaaggctgatcctgagtggcctgtttgaaaaggagtggagggaactagatacctaattagagaggagagaggagaatatggcaagttaggaatcattggatataaatgatatgacgataagagggggaggtgttttggggcgtttttccctcattctaactgcatgcatggccaatatcatacttcaacatcgctcatcgctcatcgctggcaatcttcgcttgctaacaaaaacaaaacataagaacaaacacccgaaatgaacccgaaaaggggttgtagacgtgcagacaaatcaaaaatcaagttatgcaacaatcaaacaccgacatcatgcgataaaagcagtaatttcgctaaaacatggtggccgtagcccggcaactaaatggtgcaaaagtctagcacatcccaggcgccttgagacggataccctcacatctctcacagatagccagttggaccggaccaccgatgatgcggcccttagctgtccgcttgggctcgccttcacgaacgaagaatcggccctccgaaccgaaaccctcgccacactcgtgacaattgaagcagctctcgtgccactggccaccgattgcgctgacgacaacatcgtccatgacctgttttttgcagcccagacaacgtggtgcggtacggcgcgagtggcagttgagacaccacgcgaagccatctttctcgacaaagggagtttgggaatcgaagggctatatgagaagaaatagtcagttatcttgagggcgaacgtattagaagggaatccacacatacatcaccgcactctgcgcagaagaagtggccgacatgccattcggcaccacatgccactaccacttctccttcaataggggtcttgcagctcttgcaacggggactgaacatctcgtggaaatctagatggcagtagaaacgtggcacgcgagcttcaatgtcactagaatcggtttttgataatctctcggctctgttggattccggttctgaatagaaagccacgcattcgaggggtgtgctgcagtggaaacaggtaaagcactccgggtggaatcgacatccgccagcggtcacaatttttccggaaatggaaagcgtacaacgctcacagcttgcagtggggacaccagttcgtgtatagggcgagtaccaacggctctgcgattgcggttttttccccgtcgggtggggtctagccgcttgcttggaagaagcctcgatctcggagatagtgggtactttgatgtccgggatatttatcacgggaactggagtcggctcagagacttcaatggtcggtggtgctatttcaatcacgggtagggttggacgatcgggcttcggctgatcaactggtttccaagttttgtcgaagctcacgattgggcgtcccactcgatcactgacagctgaaggcattggtaacttttcgctgcggtcccctcgttttttgctggtagctgcgcggatctcgtcactgcgtctctctctcccatcctggatggagacaagctcatccttttcttcggggggaggagtcggagtagcacgctcgtttctagcgtagccggccttgtgtgactcagtgggagaaggagtagggctttcgtttcgagtgtagccagcaacttgtgactgagtgggagaaggagtagcgctttcgtttcgagtgtagccggcattacgcggcttggtgggagtgtccttgggggtttcaaaccgcgaaatcttatccatcatagggctgctgtgaactctattctgcaaccaaggcaatggcctaggaatacggcctagggcgttgcgcggtttgtttttcattgctgacgagtcagacttggaaaattccgacttcggttcgggttccttctttggttcgggtttcttctttgtctcaatgggctcttcgtatatttgttctttagggttcttgaggattcctttaaatgaatcgctgctgacagtttgcggttcgggagcaacagactcctcgagttcgggtagtttgaagttgactttgagattcttctttgagggaccagccagagatgatcgtttgcgcagtgactccgggctagagttaccatcagaatagatacttgagccagtggactggctgaatttattggtcaaggggtcatattctcgcgaaccatttttaacagggctctggctgcccttgttggcatcaggattttggtatggcgcataagggtttttgaaagcttgacccggattctggtgcatccaaactagctgcgtggcctcatcctgggccgcttggtgaagtccaacatcgtcctcgatatccattttctgcaaggcctctcgtagtgcccgtgcctcttccttttcgtgtcgtcgttgcccattttcacgataggacagagcgggagatgccggtattgatatggtacgtgcgtgaatttgtgctggaaagacgttcttccggatcgagtgcgttcgtggctcctgagctaaaggacgacccattgcgccggcggacgcttgggaattcgcccggcgatgggacattgcgctgcctgaccgtcgatcttcaacgtcatgctcgaccggggtacgcatggagaatgccgaggatgcccttggaggaaggttatcagactgatcgctaactgcggctgctttgcctgggtatggacgagatcctgtcggacgggcaggacgattcgctcgcaaatctttcaagtatgttgctgttgactcacatcagctccgagccgtccgacaccgaagagttacttacagacttgatcgttggacatgaaggatgggccaggaggtgagacttttctctgagtgggatgtttatgcatcatggaattgcaaggatcagggatccaggagaagatatatggataagtacagaaaagagggacctagatgaactaagatgagaagagtctagttggatctacaattgacggtctgagctggctagcgtcattgggctggtctcccctccaaacaaaccccttgggcccgtcgcgaggcaacggatgactcagcatgggtatctgccgataagggcttgtttttatgaagccctataagcccttttggacaacaagtgtggataatgccaatgcctggcactcgagacctttccctttccaggttgatgctcacctcttgccgctttttgatcactaagtaaaactgagctgaatattctgacttgatcacgagccactattgctaagcaaagcgaaccaataaatcatatccttgtgtgtacatgtcacgtgacccttctctaggtgaactatcatcggctaacttgggcagaaagacccaaccggcagaataaatatagactaggcctaatcgggctagacgatgatttctatttcatgtctgtcatctgtcgacgagtttcatctgcaacataattatctcactcaatgggatctatatcctaaacacggccagtatgccgtggaactacttgcggttatttactcggaaaatgttcgaatagggaggaggtgtgagaataatgacactagcgccagcgttaagtagaggcttattcctgatgaacgcggcatgtccttcctctactattccggatgtcgaattgggtgataatgggatgagacacatttggaacggatcgttgaggatctccgtggccacatagaaatgggccacagtccatctccaatcctgtcattccgggtgagctaggcaattaaacggatgacgataaggtacatttaaatatataaaagttaatactcagaatcttagccctatggatacatggctctattcaagctcatccattattgaaaccttgggatgtcatacttggctgtggagtatcttgtgccgagaagccggtgcggagagaatcgagttgggcagatgtgggggaatttttagtcacgagaattgcatagcttcggacgcgagtagctgtatattagcttccttcattggtctgatagagccgaatctaaataataaaccaggtccgtcctggggatctcgcctctatacgaaccatgttccaaggtaggattcggcattcagtccgatagtccgatgactccaattattttattaccaatgataaactgatcgaaatctagtccctttttctcttagcgtgctcatttaactcttttgcttccttttacaaaaatctctatgtcgtgacgaaaacggcaaccggtttcggtctttaaggagctcgtgatctcggaaaataacaagccgggcttgtatctgagctatcatcatggcggataatgtgcccatcgatatcatccgttcccatgaggacgaagtggaccgtgagagcgcagaacagaaagagacgttgtatccactgtcggcaccattggaagtcgacgaagatgaaaaatataagcacgatgtggccccggacggtggctatggctgggtctgtatcgcctgtgttttctggatcaatgcgcatacctggggtatcaatagcgtgagtcattagtcttcaccttcaaatttgcaccttcgtcttactaacaggtctaatatccagagctacggagtcttcctgagctattacctctcaaacgatgtattccccaacacatctgccctatcgtacgctttcacgggcggcttgagtatctcctgtgccctcctggtggccccagtagccacccatatgatccacaaattgggtgtacgatttgtcctcaacctgggcatcttcttcgaaaccctctctctaataggggcctcatttgcaacccagaaatggcatatcttcctcagccaaggcgtctgtttcggctggggaatgggcttcctcttcgtgggcagtgtcggcatcaccccgcaatggttcgacaagcaccgcggcgtagcgatgggcatcaacgccgccggatctggtctcggtggcctgatgtactccctcgccgtgggcgccattattccgcgctacgggctagcctgggcgttccgcattttgggtatcatttcgtgcgtcgtgaatctggtctgttgtaacttgctccgggaccgcaacaaggctgtcggcagtagatttacggctttccatctgcccctcctgcgtcgcccggagtttttgctcttcctcgggtggggggtgttcagtatgctcggatatgtggcgctgctgttcagcgttgccaactttgctctctctgtcggtctctcgtcacaccaggggagtattgtctcggcgctgctcaacctgggtcagggtctcggtcgtccgtttgttggcatgttcagtgacagacttggccgtattaatattgccactttcctcactttcctctgcggtctgttctgtctcgtcatctggacttctgctgacagtatgggtgtcgtatgcttcttcgccgttttggttggcactgtcgcaggcacgtattgggctactgtttctcctgtcctggcggagattattggtatcagggatctcccttctggcttaagcattacctggctcacgcttgttgttccttgcactgtctccgagcctatcgcccttcagctccgcagccatggtattggtggcgagacttcatatctccacgttcagatatttactggattcatgtatattggtgcttccatgtgtctgtgggttgtccgcggttggaaggtcggcgagctggagcgtgctctggcaagccgtgattccgtcgtccagtctggcccattgactggagtcaacggcggaaatgagaagcaaaactgccctgcgactatttccccggccttggaggccactgacacaaacattccgttatgggccccggtcagcttggtacgcagaatgatctcgttgaaaaaggtttaaataactgcgtagcgcagagtacatacatgtcacacaaatgaacatacaaaaatagacaatcgtctgtcattcatttgatttgaacgccgttttaatactaacctacatggatgtagcttttgtttcatgcctccgtaaccaagatccggacccttctcttgccggcgccacgaccttcttccttgacggagctgacattgacacgaaccttttggaaaagttcaacagtcacactgcgttccttctccgggtgacccttctcctccacacaaagggtatattcctcgctgtcaaactccgtagtgcggtgaggagctagctcccgtctctctgcgacagaacgagctccagattcaccgggtaggacgaagtcctccagacgaacgacaccttcaatgccgaagcggggaacaaagatgacaacaccgttctcgaacacacgcatcacgtatccttcttcttcaatacccgcatcaacaccgtcggcggccatcttctctccacgggccttgagagcctggcccacgtagtattcaatactagcgcggccagcatgctgtgcattgcggtgacggacgttgatgttccggcagatgtcttctagcttgttgcgggtgctgacaccctcgatgactgcgtgtccatcctcaccttcatacccaatggcagaagccaattgccggtgaaccatcagatcggcatatcgtcgaatgggtgaagtaaagtgggtgtaaatgggcgaggcgagaccgtagtgacggaattcggattcgccaaaggcccccgcgcagaaatactcggcagaggtcatgcaacgggtcgccaagatacggaccagggtgttgaagaatgggttcttaggatcgatgcaacgatccaaagaatcagccagagctcgtgagctggaaacatccagctccatgtctcgcttcttcgagagttgtttttgaaggtcctcgaaattttgaggcgggggagtggcgtgccgacgtagcaaggccgtctgaggaaaggactcatagaccttcgaggcaacagtgatattggcgagaagcatgaactcttcgaccaagctattagtgtcaagcatagccttggtcttgacgtccgtcaaaggatcgcccacttcatcgccttcactctcaatgcggacttctggggaagcgaggttcaaggcaccagcgtccatacgcttctgacggagaaccttggagaatttcaagagagtgcgcatgctttcggtcagctcgtcctgctgtgatttgtcgtcaatgcgtaactgagcttgttcgtaactgaatgcttcccgggagcgaatgaccgacttgctgaaatttgaagacactatctcggcatcaggtgtcatctcccactgaaccgagaacgcatatcgttcaacatagggcttgagagagcaaatatctgtaccaagaaggtgcgggagcatgtcgatacgcttatcgactaggtaaacagtggttccgcgaatactggcctcgagatccattgggttgttgggtttgacgaaatgtgacacatctgcaatgtggacaccaacctcaaagtttccatttggcagaagacgcgcgtgaagtgcgtcgtcaatatcctgacagccgggtggatcgatactgcaaataagcaagtctcgaagatctttccggccggtccagcctttatcctccttcgagacaggaaccttccaattatgaccttcagatggaaggcagtccaacacagatttcgggaacggcttatactgcacgtcgtattcaagcaataaagcctcggtttcggcacccttggtttcgagctctcccagagaccgaatgaagtgaccggtaggatatctcgaatcgcggtcccaagaatcgatggtgacaagaatacgctgaccgagaatatcgctagcctgtcttgtgcgtactctgatcttcgggatacgcttgtccatgggtagtaagaaaacgttttgttgccgtctaccagaggcctgtgagccagtagaattcgagtcaacgtgaccaacgtattgacgccagctgcgcttgataacaccaacaaccttggcagtaggctgtggcttgccatccgagttcttgccatgggcctttttgacttcttcctggagggctttgcgttctctgtccgttaccacagcatcggtctcctcagtatcagggttatcattacgggtcacggcttcctcatccacaatcttagtcgaagggctcttccactggtcctgtggtagtacttcgaccacgacagaatcacccgcaatagcgcggttactattatcacggcccaaaatgagaagaggtttatcgaaagccgcggtcttgacggaggcttccaggtagttgtaaggagaaacattgaacactccctggtgcaatgtcccggctcgcagaccagtcgtgagctttgacattgtgaaatattcagggtagaaaaactccccgcgggttgtctctttggcatctcgcgcatcctttgactcgctgatcatatccagcaacatttcggacccctctaagccggagacatagtcggatagcgacaaggccgccacattttcttccttgcatttccgaagattctctttgtcatcagttatgacaacaattgccggtatcgccttctctttcttccctttttttgctgattgttgcaggtgagaactgtaccaggttgctaccatgcgcacggcgcgatcgttcctgtcgttgattgtttcctccgggcctctgcgaacatgagtctctcggcgaaactcgttgaaaaagaggtagaagcgcttttcgtctgacttgacgagggccagaagacggttgtaaagtggtattgatcggtttctcaattcctcgaggacagtctggaggacaatcacatcgtaaaaggccccagtgtgctcaaaaagatccattccattaagcagcgcatttgtatcgggaacaatgtagtggcctcgggggaatgccgttgtgccggcggggcgatcagataggatgaacggcgcaactgtttcgattagcaacttgcttgaccattaccgtaataatttccttactttttccattggcatcagccggcgcaatcgtcgggcattgtgagcagagcttagaagagcaaggaatatcttctctcaaatagagctcgcggacaatcttttgcacctttccacttttcgtagacctaacgaagaccttgctggtaacatttgcggcctgcgggttggcagacaagtctcttcgtaaactcttcattgcgacggtaagattccactgtctagcagtggctgaatctgtcaaaacctgtgtgtcttgtgaaagatccgaggtgagagccttggcgagaagaaaggttatcgctgatcatcgcgataactagctgagtcagcacacgggctcgtcactttggggtcgaaagatgccatttgatcgctacaggaaaggtattttgtcatagagaacttggttttggattctactctagatctctttcagattctgaacttttatcactatggttttagcggtatgtgctgaccatccatcggacgtgagccacctagctaacaacttgctttgatttaggccgtggggcagctatgttcgactagcaacataacttcgaacctagctcaatgcaaggtgttggttcgaaaggctgctgcagcaggtgccaaggtgatattatactattccacagccaactttccgatagacagctcatatatgttaggtgctgtttcttccagaggcatcagactatatcgcatcctcggcagagcaatcctactccctcgcccagtctgaagagagagctagctttgtgtcgtccttacagaaagatgccgaggaacagaaaatccacatcaatgttggaattcatgaagtagcctctgaaaccaggctcaagaatttattgatttggatcgatgataagggaatcatctcccaaaagtaccagaaggtccatctttttgacgttgatatcaaagacggacctgtactcaaggagagcgcgtaagccttttttcagatccaatagttgacttatcaatcgctaaccttccatcaggagcgtccagcccggacaacaactccctaggccatttgatacacctgtagggcgtgttggtctgagcatttgttttgatgtaagtaatggacgttggaatcacatcggacattaacttcttactcatgctggatcatttagttgcgttttccagagatcagcctggcattgaggcggcagaatgctgaaatcatcacatatccatcggcattcactgttccgacaggaaaggctcattgggagcccttgctacgagcaagagctattgagacccagtcatatgtgattgcagctgcgcaggcaggcccccataatgagaagagacgaagctatggtcattctattatcatcaacccgtggggtgaggtggtggcaaacctgggggatgagtatcaggaaccacaaatcgcgaccgccgatattgatctcgatcttgtggcgaagattcggcgtgaaatgccattgcttcggagaactgatctatatccagaaatttgagagccctattgtgaacagcgaggaggcaaatgccagtggccctctttctccagtacatcctgcaaatagcctatcagatatcacttccatacagtttaacttaaatcattttcataatgtgcttagtgcgaattataaccatttttctttgcgaccggagcacctataagcaacatgacggaaagaaacttcgaaaagtgtaaagtgatacaacaaggaacgaacgaaaatagatgagcatgcagaaaaaacctgtctaagaacgagaccggaacatcatatctgccgtcgcaagtagtacagacataaatcgaaatagtccctctttgatctctatgtacaacgtacaacttggcgtttattccttgaccttatcagggtcctcgaggataccctcagcttccagtctccgacgagcctcttcgagagcccatgtttgtatactatcgcaattgtcagtattccagttgcgcgacgagtataaacgccaatattaaggcactaggtcgggatacaggttatacgtacgaagtatcaggcttgaaaacgtatgcaacaccggcgaccaaaatgcttccaatgaatccgtagtaccaaatgttctcccagccttccttcacgtacttctggccgggcttgacaccgaacagccacccggtgggaggatcatagtgatcaccgtgatccgcggcacggatactggatcgagttgagaatgcctgggtcttttgagactgacgaagcaggcaacgcgcccggaggatgtgcgacaatggtcgggcactcatcttgaagatgggatgaaggagggttgatgccgaaacactggcgtgcaaggagattggtgagagtcacgagggacagaatatccttgctaaattcaggtggtaaggacggtctcaattgatatgttgcctcttgcggtagagtggaggggggggcttcggcgggttgatgttgaagccgtaaaaggccgggaagctgtccagttatcgcgctagtctactttgggcagttttcttgtccgcctttatacctgttatttcaggcacaactacgctcctgccttggaaaataggtgtcatcactacacacgcgacgcgttcttatcacatctggccctcccatgctgcagggcgctggactcgccattcgtttcatctttctatatgcacgactcaagaacattcgaagtaactgaaccggtaaataccatcttttaactggtatgttttatctcagacccccaaaatatccccatttctgacaccgtcctactcagcctccagcttctacgcggaatgtatccttaccgattttgagcgcgtcattggatatttccgaatcgaagcaatggcaacaaacaatgcataccccatatcctcaaactcacgaacaaagttgagcgcttttcgcttccaggaaggcgaagtagttcccgacggcgccagctcgaaagacgagacgacatcagtcaatgggaacaaacaacatgaggatccgggctctaacagtgtgagggagccgatgcagacttcttctgataaaggatattctccgcctctcgaagctcaagcaccggaaccccaattacaagaatcaaagccgattaaagaatgccctcagactccgggaaacaagatacctctggcagatttgatcagcaatgctgaggattcgtttaatcctgccgaagtcccggaaatgacgccagttgatcaagtcatctggcagcatgtgcctgccagctcgaacccagacacctcgtcccagacaccagcgggtcgtcgtaggaagcgccggcacagctcttcgcctactggctctccctcgaaagggactaagaaaaaggtgcaaaaagaaccctttgatcttaattcaatacaagtcctattcaagacaccgcagcatgatatggccgctgaattgtggagtaactacatggataaaaacatggtcgatggcccggatgatcttccgccgccacggttcgcaaatcttctttcctcctcaccccaaacaccaggttcgagcagaacaagtcgagactcgtcagggctgagacgcgcgattagctgcaccaccgatttccccacctctcgaacaaaacggcgacgagtcaatgaactagatgtcagccgtggcatatttcaacgaactaacagcaatgtcgaatctgggagacccaagtcttccaggatcaactatcttatggagaaaattgaaagaagcatatacatggccactgccgatgcgggtccacctggatcgtcacccctacgccaacatgtggatacacggaggtgccgatcgtcttcacccacgaagaactggaggcttcacgaggccgacgaagaaaccactgaatccccatgtgctgtaccacctgggaaagtgagaactgggaaactgcccagtcttcaagagtcgtccgacgagttcggagacgatgatcttgatcaaggtcttctggacctggttaatgcctcggaggatcctttcattgagccggcacatgcatctaccgagtttgtgtctctggggtcttctgaatgggctggccttgacgcagaaaagtctcgttcatggcagcctgaagattcaatgctcaacagcaagcctctcatgacaataccccatagcactacgactaacgaaacaaaacgcgatgatatcgatgaattcgatgaatttgaatatgaatacgatgatctgcctgacaacttgcaggaaatacttgcaaaatgtgacacaaagcccgttccggtcaatctattgaattcaacgaccgctggaccatctttgcagggatcagatacaatgaataccccggtgaatggcagtatgcatagcaaacccccaaccgccatacctgtcaaacctgaggtggcatcatcggatgatgagtttgatgatgattttgatctggaagccattgagcaaactatgaagcaagcaggtgaaggtggactcgctcatgttcgtcactcttagtcagttaatttttagatatatgctaagacagtcaaaacaaatagaacctcaaaggtcgccaagctatcaaacgttaccgggtcgttgagatcacgaagagcacatatgttaccccgaaaggacgtactcagccagagcaggtcagatacattgcccttgcctaggatatagtcccgtccgctgactttgagtacagggcttgctagttgaagacgagaaaacccgagaccgcaagtctattatcttgcgagagtcatggttcgacactccctgcagcaaggattcgtatatccacctagtcggggacttcaacgtagccggccaatgcattgtggataatttgaaccacatgatcattcttcaccccgaccatctcatttcagctacggtcgtagcagactcggtagactgccagcgacgagctgtgcttcaagatcgagtcaaagtcattggcgcactcgagcgaccgcaagcctttggagtgtttttccacgaagtttttcaagaagctctcaaagcgaacaaatgggatatgaagtcattgaagacattggtcgaaaccgtcctgggcagacacatcgaagagctgtactcgattcaaatgagtatcccagaagctgttgaatatctcatgagcaggatgcctgctgttctagactgggcagatgctttcctgcatctcaagccacaggtacgtctcacggccgctggatgggcgaaagaggccaagaaaccttgctaaccaagatcaataggccaattctatggttgaagaccgcaataactctaagctgaacttgagtatcaacaaactgcttgaggtagaggagcacatctggtccccaatgtatggcctcaaaggcaatatcgatgcgacggtacaagtcacttgccgtgaagatgaaatggagaagaacctggtggttccgctggaactcaagactgggcgaagggatacaagccagtcacatagggcccaaacagctctctacactctcctcctgtcggatcgctatggtaagtaatgaggcctccgatcctattccgactaattgactaattgctaaaattatcgcagatatcgatgttacatttgggcttctctactacctcgagttaacgaaaacactcagcatccgtgcggttcgacacgaactgctccagatgatccaggtgcgcaatcacctctctggctatattcgtgagaggcagcagcttccaccgatgctgaaaaaagctcgtcaatgtattcgatgctatgccaagactccttgtctcatctatcacaagctctccgaggatggcgatggcgagaccagtgcacttggcgaggatttcgatgcagttgttggtcacctggacaacggtgatcgggacttctttcgcaaatgggatgaacttctgaccaaagaagaaggtaatctcgtgaagtttcggcgagaactttggacattgctgagtagcgagcgagaagccctgggtcgatgcttcggggatgtcgttatcgacccgcattctgcgtatgaggagaagactgggacaaggatcaatcgctaccattatacgttcgttaaaagacaagcgtctcctggtttctcctttgctgaatcccaaatatctgtcggtgaaccaattgtcatttcggatgagaagggccattttgctctcaccaatggatacgtgctgcatactagttcttcacacatcaaggttggcgtggaccggaaacttcacaatgcacgatcaaagacgactggcttcgatgaagtcacaaatcagtctttcaggggaatcatggagattgggaaagaagagcctgctgccctgcagagcccagacgagcagctcgtttaccggatcgacaaagatgagtttagcaatggcatggccattgttcgaaataatctcatctgtatgatggataaagacttgttccaagcgaggcagcttcgacagctcattgttcaggggcaggcgcctgccttcaagacgatgtcgtcttcatactcgatctccgatcctggcaatctcaacgtagaccaaagacaagccattgacaaagtgatgagcgccaaagactatgctcttgtccttggaatgcctgggactggcaagaccacgaccattgctcatatcattagggcccttgtttctcaaggcaagagtgttcttcttacgtcttacacccacactgccgtcgacaacattctgctgaagattcgagacgacaacatccgtgtactgcgtataggtgcaaccgccaaaattcacccagatgttcaggaatttgccgatcttgccgcagtccaaaaatcaaccattgaagaacttaaggattcatacgaaaagccgcaggtcgttgccactacttgtctcggaatcaaccataacattttcaaccaacgcatttttgactattgtattgtcgacgaagcatcgcagatcacgctcccagtctgcctcggcccgattcgtatggcaaggactttcatcctggtgggtgatcactatcaattgccgccgcttgtgcagaataaagcggcccaggaaggaggacttgatatcagtctcttcaaactactatcggatgcacaaccaggttcggttgtcaacctagagcatcagtaccgcatgtgtgaggaaatcatgttactttcaaacactctgatttactcgggccgtctcaaatgcggcacgccgcaggtagcagcccgatctttggatatacccgacatcaacgcactagagaaattccatggcgaggacttgagtcatgctctgtcacagtcaacccgagaaatatgcccgggtgtccccagtagcccgtgttggctccgagacttactgacgccatctgcgaagacccgcctggtcaacaccgatcccatcggtcccgcagccctcgagatagcacagggaaaccgtgtcgtgaatcacatggaggtcttcctttgctcgcaacttgtggagtcattcattgcctgtggtattcccgcgcgcgacattggtgtgatcactttctaccgcagtcaactctcgctcattcgccagagcctgcgacgctacggcccagatctggaaatgcacaccacagacaagttccaaggccgcgacaaagcggtcatcattttgagctgcgtccgcagtaacgccgaaaacaacgtcggcgagctactgcgcgactggcgccgtgtcaacgtcgccttcacccgcgcccagaccaagctcctcgttgtcggcagcagatccactctccgtgatggcaacgagctcctctgcaaatatgtgcgcctgatggaaagcaaaaattgggtttataacttgcccagcggagcgatagacaagcatttcttcccctcttgtaccacacaatcgcagctcatgtctccgggtgcggctttgactcctcgctctaccaagggcaaaggtaatggcaagaacaaattgcctccttcgcgttcttcccgtgaaccactgagcccattgggctcccgacaagcagcgcccggtctacgaaagccttccaagacaggtgcaaagttgttcaacggcacgaaggtggttgggaatcggcccatcttacgagacatagtgaatgacttgacgggctagcacacctagcatacaatgtttcaaacaaggcccttgtttctgttcttcaaatgcagatcgaggcgtcgcgttttatcatcacacgcgacttggcacgctgatacaaccattcgtcttacatatggttttttttcttttgggcttgggaaatacactaagcactgcagcctgttggttattagctgtcaaatgtagtcccattgtgaaactgtagttttcaaataagcaacagcagacgctcgacattcagcctctcaattaattgaatttacaatggaattgataaatgaaaaaatcgtattcatgtaggctacaatccatgtgtacctactgcggcaccttgatcaccgcccttctcatgggcaaacacctccttctcaacaccctccgttctttccttgaatcgctcgcaaatgttcacgcatgtgctagaagagcaccatctccgcgcaattctacttagtagaaactcgtgccttcttcgcctggggtccattcaggtaggtacggtcgccattggggctaacagtccaccgggcatggttgtttgggttggccacaaaattggtaggcacgatgttctccgcaaactcgaatgttctcttcttaggcgaagcggcagaaagggaagaaacagactgcatgtgctcctgggtaggggtgtaataaggtccctgcatttgttgggtgggtcgccgaacctgctgggccgctgaggcatggagttgctgggtttgccgcatggcagactgcacgcgcgccttaaaaggagtttggtacaaggtgggctgctgctgctgagccactgaatcttgaagtttctgggatagtcggatcacagacgccatgcgctccttggaaggggtgtgatggactgcttgcatatggtaggcgggctgctggacctgctgggcctctgtagcttggcgttgttgggtttgttgcatcaaagatcgcacgcgctcattgggaggggtgggataaactccctgcatttgatgggtgggctgaacctgctgagttgctgtagcttggtattgctgggtctgctgcatcgcagactgcatgcgctcattggtattgggaggggtatgataaattccctgcatgtggggggtggcctgctgaacctgtggacccgctgcggttgggaatggatgggtctgctgcatttgatgctgtcgctgagaccggtattcacggacttgcgctttgtgcttcatgaccttgtccagacacagctgaaactgctgttgatggagccgacgctgctgttggtagatcaggagctgctgttgatccccgggtggctgacgttcgaggtgagcttgctgttgctgaagttgatcccattcaacacgaagatatttctcttcattttgaagacgctcatggatttcaagctggttctgttgactgggatgggctgctgccactggcgtcatcaaggtagaaacaggggtcatcggggcagagaactgagtcattggtgtcatcggggcagacgcaattttctgagatggcgtgactgaggccaagattgtttttcccttcgccttgcgtggggtgctttgcacttttgtcttcttctgtttcttgtgtagctcgtcatcttgcttcctcttagggacccgcttggctgccttattgggtgactgcttaggattagggcccggtttgccttgtgaccaatcaaagaccttgaccgtttcagttgctgagctgggggtggcaggaggagctggagcaatattggcgatgtcgctgactgaatgggtcgcttggataaccggggcatcagtggcaggagtgacttgaacagtgggatcactgatgaccgaagcgcgctgggtgaatttagcagcgaattgcgtgactgcagcgactcgagcgacatgggcagcagtgataggagcggtagtaacaagagcagcggtgacaggagcaactttaacagccggatcaatgatggcttgagtatgttgagtgactggagcataagtggcgcaagcaggtcggatgaatgcaaggggaggacccaggtcggcgttttcgagagacaagagggtatccagcggatagactgtgctaggctgcttggtggaagtgctcagtttggtggaagtgctcagtttggcggaagtgctcagtttgggcacatcatcatcaacgacgatgggattacacaagccaccgtgaagctccaggtgatccagagtcgctgggccaaggacagggtcctcaccgagtgggacaaaggcatcttcgaaagtcgagccggacgtgttgtcctctccctcgaagtgatatcctaggaacacaagtcagttcagttcgactttcgtaaataaggagatgtacgtaccattagcacgagcgagttcccaaaggtcattggggaaacctgtctcgggaattttccattcttcgaggcccaggatacggccttcattagaaggcacaccgacggggctcgaattaggcttttgcgagtcttgatcgcaaggcacatcgacaaatgcgtcgaaaaatgattgggtaggatccataataggctccataacgaatgatagaataaaatgtgaatgtgaatgtgaatgagagtacaggtgatagagctgtcgagtcaaagaaggtgcagaaacacacaaaagacggatgaagtgtgttgattgctgagcgagtggaagactcgaagagcacaggctatgaaacagctaattgtatcttgtagtgaatgaatggtggtgggatgagaatgaaaatgcaatgagcatgggaaatgggaaggagagagaggaaagaagaagaaaagaggggggatggcagaagaggatcgtgggagtgtagcgatgtagcgatgtgctcatgtgctctcttcagggcaagataatgggtggttggagccctatgccccatggggaagttcaagtgtttgcaaagggcaagagttaggtcagggctcggtcactgatgctcccatcaactcccaacagaaagtcacccggccagttcccacggttccttcgtccttcacctgagacgtctggctagattcactagactgtgcactagactgtccactaggaagaaccataaccatgaatccgtcccttccttccacggcttctttacctagagtagcgacggcaagtgcaaaccagctggccttggtgttttgcctttccattagacaatgttagctcttgaccagcctttttttgtaaataatattcgtgactcacaacatattgaggaacagctgcatagtccaacgggaggatatcaaaccatgccattttaagctcatcaaatcagaggcctggccttcctctgcgtctggagccgcataccgactaaggtacggatcgacgtcatcttccccagacaaccgcggagaagccatctgaaccatggcaatccattcggatagggagccacaatattcctgcagatcatcttccgacatattctcgagtactttcccgttttcgtaaaagggcggagtgattatttgctcgtgggcaatttcctgtggctcgcaggttatcaactgtggttgaaccttgtcgatcggcttgtttcctgctccaacttttagtatattcttgctactatttccttttttggcttcggagacatgatcaccttcacccggaccagggttgctttccaggtcgtggaagagccaggccattgattgagtcagaacattggtgaatgcccatacaattctttcgaagcccttcttgccatgcagcatcgagggcagccgtaagttcaattctaccactgacgacattattagtaaatattcgaccagcccatttgctctgattgtacatacagaatctttcttttgcatgttttctgccgccgctgcggaaaggcttgccagtgagacctgttcgctcatatatctcctttcctagttcaattcgaagtacgcctatttccattcgagtcaactttcggtcctgcaacggagactcttccagccgcagcttcggggaaacgaaccgtctttgagtgtgaagacattatcggatcccgagcgtccttcggagatcatcaaaatattccctatgtcccaagtcagagtgccgtctttgatgaaatggtctctctgggcacaaaagctgtctgatgcttgtgcaaatgatggccactcaaatgtggaagagcctttatactggtctggcggagacataaatacctgacttgatgtatgtgttgaagaattcatgctcaagcagagccgaaggagtcatgaagactcgtgcatatcgaggtttttccagtttggtctcgagcgacggcttgatctgtgagtagaactcctttggcaggataacctcgacctatgaccaacaatcagtcaaatgacccttaatctctcaaaaaagccatagaccacctactgagtgtacaaatgcatgattttgaatcgttgaaaagggcgatctcttgcttgggacctgctttgggttgatgaacgccggcagctgagtgatggttgtgaagcacttttcgcgacgagacgattcgtctacttcttgaaacatgttgtctctgatagttttcgaagtgatgctcaacgttgacaatcgacgctctcgagttttgaagaatcaaatttccagccgaagggtgaggttcgattaagctcgggcttatcggacccataaggctgcagctatcaaaccttccacattcaaatggaatttgggatattctatcaacttctaggtagccattgtaggaatattatacagaaaccagatgtattggccttgaatggcatgtatgaattcaagatcaaggttatcaataaatattagtagtctcaatttcgtaacgagtataatggctcaatgtagctttgctcttatgtcacttgtaaaggtaatctgaaattaggtagagctcagtctaaatacttctgaatagaagttcactccaatggctcttattatgtggtcattgtgtacatatatgcatgtattcatatagagcaaacaacatacacgtcaattagaatggataatgcatctaaacaataccaataacatacaacgtacgcctctacaaagaaacagaaaatgtaattaattcaaaaacaatcataattcaccaattgtaacctaagaaatcatattgtctatggcatatttcctggtggtgtgccaaaacgcattttttccgggaaactgcaaggcgtagctaattacaaagctcactcacttcttactatttactttatgtaattcccattttttctagtgacccaatcgcaacttggacgcaaaatccaattccaatccaatacattatacggcacagggagcagttcacccaacttctgtaatttgtttttgaaacctcaccaataccaactttggtattaaccgaacatataaagctgttttctgatctctgtctccgaaagccgctccaagccgaaagaaccggtcgaatcatcgacaacggtcgcccgctcaacaaaccaatcggtcattttatacccatcactatcgaggatcataagctggataagaatgctgggacgtactactacccccgcagcggtcaaaatgtcatcatatccctgcatggcatgatatgtatcggcattataattgagttgtggccaaatctgaagtgaaaacggtctgtatattgcttccggtatcattggagatttccacaatgatatatgggagatcctcagaatcacagtctgtgacgtggggtgacagtctgagtcgtgcgtagaactggttgaacgcgtcccgcggtcaatttcggaagcattgacctgggataaaatataccttatgcatcgcaccaggttctgtttgtacgcaagaattccagagtttcatctgttgccgttctttctatgacgagattagtcgttgaatctttttcaaaagaccttttcgaggatagggaagtataccatgtcatgctcgaggctttgctgtatcatctgccggctcaccccctgaaaagcttaggagttagggataaagctaattgttctacaagaagaccttacctcaaaccacactggtcgatccataattcctcgagatcgggtaaggaatgatagacctgaccgtcgcacacatatatagatctcccattgggtggtctaaggagaaacctaagcttctcagttttatacatattaatcacaaactgaatattggaccattgcgacttgatgctctcgtccttgaggtatccctcaagtttcttgatgcgttcttctcctgagacctcataggggtgcgagatagcgggaagagctttgctaaggtcgaacttttcgatatgttccatcttgactagaaatcattaatggatgatttgggttgaaagaggagtttcccatacaatatatggagataacgggagaagttagcttctgggtttatttcttagtggaatgaatgtaggacggaaggacagcgaagcggcagttattaagtatttgacctcaggtatcatgggaccttggggacctcggggttcacctgggcatcaacgacaagggtattagggtcttgtccactatcacatcacatacatgagcttggcaagcgccaagtaatcactgataaggaccactggtggtgccgataaagattccccggcagtatcgggctacccaaaggcggtatccgagtactctccaattcggtccgtctatcgttcgaatagcattcagtctaaaccgctaggtcctatcggtcttatttctgctactgcttctgccgctggttcgaatgcaggtagacatccggtcttgcgccaattgctagaggagcaagacgaagagatggcgcccgcttcgcgtcgcgagctcctacacaaggatcactttgcattcgtttttggaagcgtgaagactcaaaactacttagatcctgtttccaaaggaccaggctctcacacgtgagtgtggcttttgcgcccggggctgtcgtttatttgctgacaacgatctggaaccacaggattcgcactcttgcttggaacccaacgggccagctgattgccactggctcagcagatcgcactctacgaatctggaaccctgaacgtcctaatgtacgatactccaccgaattgcgtggtcacacagctggtatcgagaaggctcttttcaacccagtccgcgacgcggagctagccagttgctcggccgatggtacggtgcgcttctgggatgtgcgctccaaaacatgtgtgagccgtctagatgtcggcggcgaagcatttacactctcctggtctgctgatggcagcacaatgatcgtcggcaagaaggtaaccatgctgcgctgcgactccgcagacttgatctctctagtggcacagtcactaacatatgatatgtaaacaggacgacaccttaatccccgtctccgttcaattcccctcttctcctaccacccatcctgatggcgcaaatgctcttaacctcccctcctctacacccggcgcaaccacatacacagctctcgaccctcaccctcaaaccgtccaaacaaatgcgacaaccttctcctggtgcatgccgacacctgaacgtccggggcagcaaatattcgtgacgactggcgaaggcaaggtcaagatcatgtcctacccttccttcgatatcatgcacactctcaacgcccacacctcggcctgcctttcaattgcgctcgcgccgacaggccgatacctcgcagtcggtgggagcgatgctctcatctccctctgggatacaaccgactggatctgtcgtcgcactttgtccagcgagaatggtggtgctattcgtggcgtgagctggagcttcgatggccgctacattgtaggcgcatgcgacgagcttggatgtggtgggaatggactggagatcttccacgcggagtctggtgatagtatttacacgattcctactgccggcatcaatgccggtgtctctgctgttgcgtggcatccatctcgctactggctagcttactcgactaccactgatggacctggtagctccagcgctggaggcttgaagattgtcggtgctgctggtggtggcttgtaatctcgagccttagattttgcttcctcttcttgggcaggcctttttttagccctaccctatcaaactatcatgaatggacgtatcgagaaagaaaaaaaagggacgagtgccaaattagatcaatagatttattgattgtagtgcttgtagtgattggctattaacatggattgacaggccgaaatactccaattaccaaccgtataagctatccaagagtgaagagctccgccccaaaaagaccgttcattcgttcgtcatcaaatcattcaaaagcagagctcaatggaagcttatcaggctgccacttcactcgaacattgtgggaagaagataattgcaaaggggttaggagttccgtaagtaaatcaggaaaagaagatactcggtccaagatatcgtgataagtgaccccaatatttgtggaactagggcgagggagagaaaacaagcaaaagagaagtacccaataggatgacgacctgcttcgagtcgcatgtgagaggattgataaaggcgtcgatgaattagtgagaggctaggatctcatattatgagcagattgagggactcaatgtcatccgttcagcggcaacacgagagatttcacttgttgcaacaatctcaagcgagatgagttatgacactggagactattgaaccatattccaacacgcgttgcgctcatgatggccgccagttctcccagccagcgttgatcggactttcaccctggatttgaccattcaagatttgagcccattgagattcactgaaagcctccatgtttaggttaccaaagccttcattgcccgtttctggatttgagggtggaaggtcccatgcagagggcatggagaagatccccgacgctcctgcaaccgacgggctattagagctgtttggataaaaccgaccagacatggaatccaaatcggtggctcgcggatttgtgtttccttgtggcatgatgtctgaattgaccttatcaaaggactgggctgactcctgactcggatatcccgagtttgtctttcgattcttgtttccgggcggtgggtcgtcagcgccattgattgaataggaagtgttggaagatgagttcaaggttgagggggtgggatggtctgatggtgggttgtttctgtcgctgaggttgccgaaatcagatcggaaatccatgtctgtatcgataatggcccctggtggtccggcttgatccgtcgcctgagtggaggttccgaaaaagtgacttgtgtcatcgccattaaagactggtcctgcagtgggctgtgtcgttgagtccctgttccggcttgggagcgacgtcgtcaaaccggcaggcataggctgattgccgccgcgattggtactgtattgtggaggcacctccttcgccatcccttgtgtttggcggaggttgtatatgggagtacattcgaccttatcgttgcagtatgattgctagagaagattggattagcttcgattggccatttggaaacaagcccgggaaacctactaccatggaatgtgcagcagacatgttggttctctgtctatcgtccaaagcacgaatgccagttccatcaaggtcaacatccaattgaacaagaaaggactcggtcagagggtttttgttcttcatcgcggtcagagcggagacaagaaattgtaacgaggaataaacactcgagtcatctggtcgggatttaagatactgcacaaaaacacgagcggcaatatagagacaaaatgacatgaaaggattcagctgcaaggcgttagtgcaaatgctttttaagtaagaaagctcaatagaaactcacgctcgtcagatcaacgtggctgatcatcttcatggtactcgaaatctggtttgcggcgacaaggcacctgcgcttgctctcggtcgtaatctgattcggcatcttgttcttttcggccttgaatattgccgcttggtgaagacatatagttgaagtatgaatgctcatgttggcgaaaatgacgttcacgtccgagacgccacttgggagtcgaagatgatcaggcaacgagagcgaaatgtgcaaaagaatattatcatggctcctgtggcgcttccaaaaatctccattgaggtcatgatcgttgtcttggggctgaggccgatggatatgtatgagattacgaccgaaaagacttgccagaaccaccacgcatgcaaaaggggctagtgtagatacaccctctccggcaatgatatcgttcagaggaagtgttcgttgtggcttgctcttggtaaaagagtcttcggatgcggggaggtttgtcataatctgattgtcgtcagcatacagctctgcgctataagagggttcacgagatactaacatcgttctcatcaataagaatgggccagccagttccaacgctcgaatatcgatccgtggcaaatgcgccccagaagactctcctacgttcttcgcgctctgtccaatctttcggtggtaaaatggattgtttgacgtcgagaccaacaccatcaagacgattcaatcccagcatcagtgcgagtcttgcggctttaccaacactcagccaggctcgtgggaagaagatcattcggaattcatatgtgccgataaataaccatgtttggcaatgtgctaaactgacgatgttctctccgaatcctttcatttcgtccgcctcggcatatttgcgtgcccgctggtagaaatgactatgtaggaagaagtatttgtcgctgacagatgcggcattgcaccacataatgtatcgcaagcagatcggtgggcgcatattaggggcaagattcagggctgcatagtaacgcgggcggtggataatgggcatcattggatagattttctcaaagaataaagcgtccctgcacggtaccaatgtattagtgaccacaagtagaaaggcgcatagaacacgtacagttcatcgatcacgtcctgtggaggaaggggctcctctagtcctagactgatcaagtcccattgagagttgtcaccctgggtaattggcggcggaggatacaaaatttgacttggctggcctgcgccgggggcaatagaagctgagaacgaattatccatgttgcctccaatgcctgccagccctcctaggtccgaaaggtcgggcaaatccagtatagattcatcggcgataggtgctgtgaatgcattctccaatggttgaggttgggaggttcgttgggtgggttccggatcctggactttgagaagagtctctacctgagctgataaagtcatgatcgtcagtgatatagctcacggtcaatacggcatttgcgaccattgtcccagcaagttcgtacctaaccgcgcttcaagctgcttaacatatccccgtttaggaccactcttcttccgcacttcatcgtaagaacattcatgtcccagacgtgagcaagtcccacagctcgggcgtctcccatcacaccttagtttcctcctccgacagacgacacatgcgatgcgcttggggcggggaacgaagttggtttctccggtgctagtgctttcggcagcggcgccactttcactagacatgaattccatttgagacgggccgaattctgtggagtattgcgacgattcgggtccaaaagtagacgccggaggtgccgccatagcgggcttgattgcagacttgtgatctcggaatatggtgcagtaggtgagtaattcgagtgaatgaattgatcttgaatagctccggtttgtccgggcgcggtgttattaggcagaagctaataggatagacctgaggcgtcaagagccaggaacatccaaatgttggccagatgtgccgaagtggggatgtgaaaaggaagttctatgaatgatggcgaagttcgtatcagcagaggctgagcgtccggcccaacctgtctttatgaggagctagatcaaagagcccctatagttcctttcgatcggattctaattagagccatgggaaagtcctgaattttcattctaatccccaacaagacccttgacaggtgcgatcagcggagtgccacgcaccagctacactgcctggaggcttggcacacatctagtgggatccggctaatcagagtagagatagagtatcttgtacggagtatgtgcacaccattatatatatctactatgtgcagagagaggaagcggtttctaaatctattttctttcgctttgaatgcatatggcctcgagccatcgtactgtacagtgcccattgcccgagtttcagtctgcgcaaaacaataacccccaagaaatagcgcgtggtagaagaaacgatgagacatttgatgtgtagaaaaaaacaggaaaagatatcgtacagtcatcctctgcgcggtagggatgaggtatagggtgaggaggtacaaatgggtcagagacaaagcagagtgaaatgcccagttcggcaaagcagcatcatctttagttgtatccacgacggcgctttccttggttgcgaggtctggcatgaacaacggccttgttgatcttccactttgggcgggtcttgtagccggatttggtctagaggtgaaaagtaagagtcagcccgatggaagttcagaagatacaaaacaaaaggatatacataccggaataccccaaggactcttcgggtcgacgttacccttagactttcctcgtccaccaccgtggggatggtccatggcgttcatggccagaccacgcaccgtcggacgaatgttaagccagcgtgagcgaccagcctttccgagctgggtgtattggtagttcgggttgctggtaataccaacggtagcgcagcagtccttgtggatgagccgagtctctccacttgagagacggacagtgatgtgctgggccagacgctcctgcttctgctggtcacgctgcgacaagggcttcttctcggcctcgggctcttcgttttgaatcgtttgctgacgcgagtcactacccttggccacaactgtagcatatgttccagcactccgacacaattgaccacccttcccgggtcgcaatcccaagttgaagatcaatgttcccactggaaccatgtgcaacggcagacaatttcctctccaggcggttctggccgcgagcacaccgggatcgacagtgctgcccatgctcttccacaagtcttcgggaattccggacatataactctggaccacgtcgccggcgcgcataccgtccgcggcgagaatgtagctcaacttgccggtctccttactagaagtcagggcgatatgcgctgtgcgcccgggatcatactcgatacgctccactgtgtgcggccccggagccatgcgcagaaaatcgatcgtccgaattcgacgcttggcaccacctccatgatggcggacagtgactcggccagagttgtttcgaccacccttggcgtggccacgcttgggaaacgttaatttgtgcacagggcggcctttccacaaatgatcattgacaggacgccgcaaatgtctcacaccgggggttcgcggagtgtaggtgcgcagctgaatgccagaagcatcacggccgggtggaggagcgaacgagacattcgggtcaataaaagagttcgtcggcgtttcgatagacttgggcttgatcttctcaatttcattcacgattgttgaatagcctcggattggcaaaggcagagaggagagacacctaaagggcagccgaatgccccgtagggcaattcggggttgaagcattgctgccaaaggattgggggggggggaggatggaagagacggggcttaagggaatcaattgaatgaaagtgtgattgatgaaagccaaaacgtcaatagagcagaccaacaaagactcaacagctcctctcctctgctttgtagatatgcacctaactctccacaggaacaaaaagttcgatggtcacgtgactctcttactgcaccgcctctcccactgccacaacgcgtaaaaggtggctgatgtcaggtcacggggcttccacggttcatcgttgtcaatctcaccgccctatgtccgattcgatacacgtgactcctttgttacgtgaggttcgatactatacgagaccgaaacggtcgttgtcgcagcaaccactttatttactcgttgccatactcacgcgtatctcccttcattgctggatctacttttctcgactatctcagcacatctttttcttgtttctattccgttcttcattgctcagctcaattcttcatcctagaaatttacaatagagaggtcttgaacgccaacccggtgatccacgcgactggctgagtggggcaacttgttttccacgctaagcacagtactagggccaaacatcgccttttgccctcaagctctcttccttttccctcatcattccagttaaagctacccttccatcttcccaccccccccccccactccaaactaacaaattatcgcgtgcggattcctgttgtacagtgtccccagatcaattctgtatcatttgccatctttttccccgaattcgcgcgccatttgatcttcggaaccagggttctgcgcggtcttgatacacatcaacatagtctcctttgagccgtaagcaccgactcatatcatctccacctgtctgaaagctctctctgcctactggcattgtagtctcttcagcacaactgcattttcactcttggtacgtgcacctcgtccttcatcctctggtatgaggtccccgccaaggtaatatcaaatggaatgctgacctgatttcccgagtaggacaagaaccattatatccctgtcccctttctcccttccctacgcgtcgttttccttttattttcctcaagatgcctcaggtgagcaatctttagcctgccaaaacacgtgtttgatatcctagtcgcgggatatctaatccatagcctcgagatctgggtgtatcctatgacctcactagaccgaccactaactccactacaggcccgcagccttcgtacgagaagcacgatgaatgaaaacgatgagaacggtccgtcagcacgtgtgacacgggccaaagcagccgccctcagcaccgatgcctctgccgctggagctaagaaaggcctgcagactaagcgagccacatccaccaccactaatggatcgcaacgtcctcgtgctgcactcggtgatgtcagcaacgtcaacaagaccgacggtgctgagatcaaaggtgggaagaagccggtcgctgccaaggttggtttgacttcaaaggcaactgtccagactggaggtgttcagaaactcagccgcaacaactcgtcacgaaccgcatcacgatctgccctccaaccccgcgactcgaacaagaaacctggtcccaacgcccataagcgtccgtcgcttaaggatacagccatctcggaagagcctccccgcaagaagaccgagcttgagcgaaagaagcccgaggccgaacggaagaagcctgagctcgagcgaaaggcccgaattatcgagaagattgtggaagaagaggaagtgaaggaggtggagatcagcgtgaaggatgctctgaacgaggccgtgcaagatctggacactgaggacttggatgacccattaatggccgctgaatacgtggttgaaatcttcgagtatctcagggaccttgagatcattactctgcccaaccctgattacatcgaccaccagcccgaccttgaatggaagatgcgtgggatccttgtcgactggcttatcgaagtgcacacccgtttccgtctgctccccgagaccctgttcctcgccgtcaacatcatcgatcgcttcctgtcggctgaagttgtcgcccttgatcgtcttcagctcgttggtgtcaccgccatgttcattgcttctaagtatgaggaggtgctttcccctcacgtcgccaacttcagccatgtcgccgatgagaccttctcggataaggaaatcctcgatgccgaacgtcacgtcctcgcaaccctcgagtacaacatgagcttccccaaccccatgaacttcctgcgacgcatctccaaggccgataactatgatatccaaacccgcactctgggcaaatacttgatggagatcagtctcctcgatcaccgtttcatgtgctacccgcagagtcacatctctgccgcagccatgtaccttgcacgtctcatcctcgagcgtggaccttgggtatgtttttttttttaaaaaaattcgttttgcctgtgccacacagcccaactaacttgtcataggatgccactctcgctcactatgctggatacaccgaagaggagatcgatcccgtcttccaattgatggttgattatctccaccgtcccgtctcccacgaagcctttttcaagaaatacgccagcaaaaagttcctcaagggtaaactactttgataatccccttgtcgcgagatcaaatattaaccgttttgcagcttctatcttgacccgccaatgggctaagaagtatcaccacctatacgttgacgtctccgaccatgtcacttacaaggtggaacagtaattgtaccacttacgatgtcatgctactcctgtctcggcaaagtcgattcctttcatgacttcctaaggctcttgcgacgacttgagcagggaaatcgaattcctacatatgttggcatttcattgtgctggtattcactaccttttgcatattcttacgacgacttgattaaatttctgcgctttccgcatttgtcttctgtggtggggtgttcggcgcttgtccctgtctgctattgttctcttattttacccacacatcaacctcggcttgcttgttttacatgcgtgagcattgtctcccgcctgtcttgatatcttttacattgtcgtcatcgtgttgcaggagtcgggatctatttttctccttcaaatctcagttttaccttgtctcgccctcattcaccctcgtcataggttggacggtgcagtgttatcccttttggatcctttttttgtttggcatgcaagttcccaaggcttgcacgtttgcgtggcattgcggattggaatattttgtggagccaaggtggctatggtttttgttttgtttctcaggtgtttctcaattcatcggctggaagattcaattggttgctagagctgagtcttctaggcatgcaaaattggtatcagatggacggtcgaggaggtaatcagtgacaacttgggccgcttttgttttcttcaaaatagttggatttctaacactggatccgtgtgtatggcatgcttattggaaccatttctctttttattctttcttgttggttttctgatagatctggggttggttgtagatgcgtgcaattaagctcacctgggcctgcttagccgaggctggtcccgaggtccttccaaggttagccccggggcacggtaagccgctgaattacctttgggaaccttactagttgcatccgtccttgaggctgatactggactggattgacaataataacccaacatcccgacggaataaatatatgattctatctcgtcatggattccaccgcacccccgccgtgcccattctgcaatatcgcctcatcatatcccccaacccccttcaatgaccctgagttcaacccagtctctactgccccggattcaggtccattgtcccacatcatcctctctactgagcatgtcctcgccttcttggacattatgccgcttacccgcggccatgtccttgtagcgccaaggaatcattacaagatgctaggagacatgggtgttcaagcagggcaggaggtacgtagttatttaccatctgcgcttattccaaaacgcttccttgactgatccatgtctttgatttcatacatagatggggaaatggctgcctatcctctccagggttgtaacgaaaactgtgtttggcgatgatccagatagacattggaatgttgtgcagaataatggtatgtcttgcccttgcttttctccatttcccgaaacccttgatctttaaattatcggatttgaatacggggtatttctacgttttatgctgttatgtatgttatgtaccaagattggcattcaaggaggttgaacgcccctgaccgatatcttaatattttttgtcgctaaaacagaacggcatcttctgatcacatgtctatggaagaaggaaaaaagcaatcatctaactgagtgacaggcgaaagagcagcacaggtagtaccccacgtccatttccatatcatcccgcgccctgctcaaggggtcaatcagagaacaagctttgctatgttcggccgtgggcagagagaggagctcgacgatgatgagggtgaggccttggctcgtgagatgagagttgaactggctgaggaagtcaaacgaattcaaagagacgagggtatagacttggctggaggcttggtttcagaggaaagcaagcgagggaagttataaagcacgctgtccctagtactctcttttgttcttgcatctatcattggtcccgtcttcgggttttcgctgtatatagctatttccatcgatcggtgttcggaagtccccgggctgaagcttcctgtctgatttactatgttgaggttcttattctgtctttttttgatcctgatcgacccgggtgccgtggcctcggagcatatgctagttcgacaagttagccgggtagtaagtcatcaactcccaaataatacgtaccactcgtcggaatgcattgaggtcatccgcagtagtaccctcgtcgtcaatctttttccgggccagtgtaacatccgacagttctccctcaggtagacggcggtacgttataagtcggcgagcccctgtaagatataaaatcagccgatgcctttcgacatggttgtagcacaaggctgtcacttacaagtgttgaaactctgaacagagatactgacgatctcgaggttctgatgcatgggaacagggaactcggttttctcatcatttgttgtgggcatccacattgacaaacgcccattgggaactaaggagcgaactgcgaagttgagaacgtcgttttgtagagcctcgaagccatacggccttttgggagcaatgaaaccaggtcggctacaggttaaagtcagtatttcaagtcggagaggagaagcaagaacacatacagataggcaggaatgccatcaatgatcacattgaccgcaggtttcccctttcgatttcccaaaacacgaagcccttcacgcacaccgtatggcggatcgcacacaataccatccagcacggcggttctcgtcagtggtgtattggtaagatcggaagtgaacgtatcaatgaacttgctcttgatcccatattgatcgaagttctcgtatacgcccagttttcctttctctttgccacggaagctgcgaccatcaatgtctgcacccaaagtcagagccccgaaatgcgaagcagcaactatgaagctcccagttccgacaaacggatcaaagaacaattttccaggcgccgcaagagccatgttcgccgtaatgagactcaactctgcatccatggaagtcgtgctgatataacgacgcttcttgaggtcgtatttgagcacgtcctcgcgacagctatcagcaatcttgcgactgagataaatcttccgcggatcttccgttcgcgaaacgcccagtttagaaacttcaacgtcgtcgatgtactcttccatcacaaaaaactcctcatcggggtcttttagccggatcgggcctttgaaccccatatatgagaaggatcgaatgatctctcccttctgaactaggctgcgcgttcctgcaaagtagtcaattgtgaatttgaatgggacagcaatgtagtcgttccagcgatgctgagttcgtcgacggacatctgcatgtagctcttcatagttggtgccttcgccccaaagctcgaagatgtccttgactagaatactgcgcttggcaactgcccgcgccgcggcttcatctggtagtctcacgacacagtatggtgactagggatatcagtcaaaattctgcaaattgaggatagtcatgaaaggatagagagaggaagggtgacatcgttgtggaccaatattcatggagtatggacaaatgacgatcccagtatcgatagaaagggtatcatacatattcattgtaggtgatgaattcgatgtcggcgccggcgagcgtggcacaggcttgaagttccggccgtcggaaggtctcatggagttgggcgaaccgaaccagataatccatggctagcgagacgaatatctgactgctttattcaaggatccctctttagtgggagtttatgtaactcgttgctgctttgaaggcggggtgttgcgggttgagatttttttttctcgggtcttcagaaatatactccacggcgacaaagtatgttcagagatagtatggtttgatatctccaacaaaatcaattatgttttgcaaatactacatttagcataaagagataattgctatcttggaatatgacttaaatgtttcaatcgaaaagggctgtacacaagagaatgaaatgattgattgaactacagtcgacgaaacccaggtctacccacgtatgatatcgcaccaaaaaaagaaaaagaaacagaatacataagatatatcaccacatctagctatgaacaaaaacccaaagatacgccctcccttaagatagaagcaagacatgcccaaaactccacccctatgcaccgactacctggaaaacatgtcgtgactcatatccctccaccgaggtaatatccaccttctcatcggctggtatcatatgatgttgcagatcccaaccggcccgacgagacagttctgatactaccacatcacagtcacccaagagatcaatatcgaactcggtatgtgacacaggctacacgccatgatcagtatgatacattgtcaatttcatcagcatgacttacagtgcgcgatatatagatctgcgggacgtggcgaggcagaatcccgggtacttcagcaacgggggctaccttcaacgaggtcccgatcacaatgactaggtctgctagctcccgatcttggtggattagtcgttcgccaaactcatcgggcaggtcctcgccaaaaaacgtgatatcaggctatacttttcgtaagtatggaggaaagcaaacaagggattcaatgatcactgaccttcatcactccaggagtcgggatttcatagtcgtcctcatctgaactgtcgccggagaccttgcggtctttctggtgaccattggaacttcgtttgcgcttaagaccttgcggctttagttctctctttgcaatgctctccttgcaggcggtgcagtgcgggacatttcccgccctgatttcatcgaagatcgtgtcgccagggacattgaacccacacttcacgcaggtagccctcgcaaaggatccatgacattgtacaattttttccggaagtaccccggcatttgcttcaatgttatcgatattctgcgtgtagttagtcaacagcttccccttgtcttgtagaagccgaatgaacgcatgggtgggcgaccatttcttttccgttgggagaatatccttagcaatggaaaagaaaatattcggatcctccctgaagatatggatatcgaagacttcttgtggatcgctcaggcccaggtgcgccagttttgaatagagcccggtatccttcgaacggaaatcgggaatacccagacttgtggagatctgataaaatacccgttagcacttattgaggaatattcaatacactttgctttgtacgtacacctgcgcccgttagaacgacgatgttccgagactcgcgaaggagccgaacagcatcgtcgatggtgttgtactggggaagcttaggcctccgggagaactcgcgcgagatcgcgaccgccagaagagaatgataggactcatccggtgcaccgtcgaggaatgccggaggcatgattccaaacgctgtgcataactttttggccgtgacggtttcgcggaggatggtctcttctacgaacgccgccttgccaatcgcatgcagacgctgtcggtatgcagtcgcctcttccagagtacaggcaccgggaactgcgacagaaaaccgaccagattagccaatattcgttctgatctccgaagcgggggtgtccggggtaagaggtgagggtggatatagttacataccgaggccgtcgcggatctggtcatcgcgtaggaactggatcgcctcatcgcagttagacagagtatcccatgcatcggaatcatcactgtccgtctccaaatccgacggaatctcaagtgcgaggtccggcgcgtcgtcctccatgtcgtactgtttctccatatccacggcccccacttcgaccacagtggtctctagcgaagtctctccttttggggctggtatcaaatccattttgcaggagtttgagattccagccacggagacaaactcgtttcactcgcgcttgcaatctgctctggcaaaaattcgggcgtctgcctcaccggaggcaacttaatccggaaccgatgaatgaattgcagtggcgatgtcaaagaagttttggtttgtagttcagggggttcggcatgaaagagagaattggggggaaaatcaaagaaactacttttagtggtatcaaatcaaacagatcaatgaacatgtacatcatctcatgtggtcgtcacttttggtatctatgaatccgccatctcatcgtcagagtcaacttcgatctccacatccgaatcctcgccttctccctctccttcagcttcactctcatcatcctctccaatttctttgtttatttcctgtacaagctccaaggcatgatcgcggagccggtcatcctcatactgaaggacatcgtagagcttcaagctttgcttgagccattcacgactagcatctagtgatgcatgtcgcggggactcggcaagctcatcagcggtcgcatccttaggtgcctgttgtttttctgccagcaggaagagacaccagcctccgaggtaccaggcctctacactttcatcatcctctagaatcaagcgctcgaggacttccagagcctcaaactccatattcacttccatcaggagtcgcgcaagactgatgcgcaccgcaaaatcgggaattctgagatcttctggggccaggtccttccagaggctcatactgcgagtgagcgcggcttgcgcatcttcagtgcgcagttgtgagatccggatggacgcgagggtctgtagtacctctggcgcttcgggtgtgacaagaatcgcttccgtaataagtgcttcacaccgagcttcggcatcctcttcccagctaagcgaaaatgttagcgtcagcgcgcaatgaagtttggaatatatagaaactcacgaaagatcggtcatgtaggtttcggcgacagcgcagagtgcgttagacaacttagtcttcttctgtgtaatatcggcaatctgctctggtgactttttcccctcaagagactgaatagtctgtctgagggacgccacacccatctcgaaccacaggacgctgtcctttccaccttgttcactcaattgtgcaagccataggaacttctcagctcctccaccctgggattccggtatcgagccatttgggtcgagttgaacagcctgaaggaagcagtttctggcggtgtcgatgtcacctagttcaacattgatttctccaagaaggttaatagcggggagctgtgcagtggtgttctcagcggtcaactccagagcctgctgtgctaccacgagtgcctcatcagctcgaccagtttgtaggaggattgtggcttggtcgagtaacgttgagggatcttgagccatgttgccttttgagattgagccaccagggccgagaacggacttttcgcggggtttggatgatttcttcttttgtggtctggactttcccatggcaggatgcagtaaaatttaataaataatggtgatgtcgtcgactagaatattaagcagagtgattgtcaattataacccacagggtatctgggagaagtaaaaaaaaagtgtacctccaaatttttggagcggctgtttgacaggtttgcatgtgggaccgcaatattgtaccatatcgtaatgataagtccagcatgtctacttgctattattcccatcgtccctgcacttactatagctaaccttggaatggtctattcttctagctattacacagagaagaacatagatgcatgaagaaagatgtttaaatttttttctaaaaagacttctcacaaccgtggttgtcgacatggagcattgccaccattgtgcaatctcactctacatgtagagatcaatcgccttctttctttctgtctagagctaaaatgactcaagtcggtttctttctgcctccccgctatccagtgggcgagcatatcaccttctcggagcccaatcacaccgaatggaccatgtcgctaggatctcccagcaaaactcccagaatgacgagtccgacgttgaagctgggtatggacccttgtacgccgttgcgatcttccgtgtcagcagggacttagatggccaacaggcctatatgctcgtctacctacaagttccccatcaaggaaccgagttcttcccacctaatgagcgagctaagcaggccgctgctagaggccactgcgaagtcgaagctatcaaggccttccacaaacaatattcgactattacacctgctctccttggaataaaagaggatgtccaggaccaacaaggggttatcccggggggcttcgccatccactttgtcttccaacgtgtcccaggatatcgtctctgggaagatcatgttatgcctaaacatagagcccagcctcatagattctttacagatttcaccgttcccgagcgagatcagattagagaatcgtttaataaagggtatcgcgagctgaataagctgggatgggtgccctactatccctcggcaactaaattgatctgggaccccattgcctcgaaattgtgagtctttttcatcgtgagcctaggttaggcttgtggctgattattgaattaggtactttgttgactttagagatgttcactaggcaggttctcacgatgaggatgttgttcctgatggcaacgataccctagaaccgaaagagatggccccgattgtacgttgggggatttggggcctcaccattccccctgataagcggcaagaacgagcagatctttctaagtggacgctctagccctgaagtactttgctgcctatgcgacgatgtagctcttgagtctttacaattccaatctttttcatatgtatcggagataatcacaatattacctcctacatagccaagtgattgctgttttatagctatcttcggggtttcttttccatttcaatgttagtgagcgggtcatggtgttcttgaagctggaagtcggcgagtttaatatattcacgtgaccgggcttggccccgacgttggttgcgacttggtttgcgctccgatctcttttttcccgagtttcttaatattgcgatatctcaaggtcttgcctagatagttttccaagctgtcccgctggaactactcttgtccgtgtccgcgctgtttcccgaagaatctgcactcccgcgctcaaattgttaccccgccggcggatcaacagctatgggtcgtgaagaccagattgaggagcgtgaagtgctcgattcaatcttccccgatgaaattagcggtaagtaatagacgaggcgcctagacggtttaaactttctttttatccttgctcacagcgagacctggcacctagacatatccgaaacctcgtaccgagtatccataactcttgatgccctcgaatatgacggcgatgaaacagaacaacctgtgatatgcctggaggtctcttacccggaggaataccccgatgttggcccgaatctcagcatctcgtcaccacccaatgcttcgaagcatcctcggctagatgtccaggaagaccgggacctactgatggagtctcttcagcccactatcgaggagaacttgggtatgccgatgatatttacactagtcagcgcacttaaggaaagcgcagagcttcttatgtccgagcgagcagacgccattcaagccgagatggaccaagtcgctgcgaagagagaggaggaggagaacagaaaattcaatggcacagcagtcactgtcaagtcattcttggagtggagtgccaagttcaaaaaggagcaggaggaggaggagcttcgcgtacgcgaagaaaaggaatcggaagacaagaagaaaaagcccacgaaagaggagaaaaaactcacaggccgacaattgtgggagaggggcttggtaaagggcgactatgatgaggaaggtgatgatgctctaccggctgttgagaagctcagtgtggccgcatgagctgatacatagaaatgttaatgacctgccattacttcatgaaattatgtattataacctttttgaattggtgtgattatactgagcgatcagtgaactagtatcaagggcaggcggagtaatatacagatctgcaagtccacatggacttacgttatggtacagggaaagataatgcccaatcagcagacaaaagaggagtggaagagatatattgtcgtggtttgagctgcttgctatagcccatggttcccattgatcggatatgatcaagaaacctggctaggttggcatggataatgtaacattcctttacaacaaacctttgtattctgatctcgggcgacattgacaagggcatggccatggataggcgactctgatgtggtcaggaatggacctagaatggccatatggttgaccaacatccgtctgcccaaagagctatgggaatgtaatttgggatagcgcggcaagacggaccactcagtctcattactttggctgcttttggctagcttcttcttctgccaaagccctttcagctagaacaatcttccacaggttatctgcaagctctttagattgcatgtcgaagtgtccgattttcgcattgacatcggcaatggcatttgcaggatgttcagaccaagtggatggctccttagtgttggtgacgcgatcccactcctcttcgtcctcggcgaaaagtagctctactttcagtctgtcacgacgttcaatccagttccaacgacgtgtaagttttgttcgtatcacactgctaacgtttctcggttgcggttttttaaagcgcaagaacggaagtccgcgtgcattgacaagtacagggacattgcgcttcttgtcacctaatggctggggtctgtttaggaccgagccggcgttcggatgtcgctgatttgtttcctcctggaagcgaatagacttttcttttcgggctttcttgggcgtaagaggtttgacagatggcgctactagtcgaatcttcctttgcatcgcagcatatttatctttttgtgacctagcttgtgctataagagttgtgatccgctgtgcatcatgttggttggtatgggacgaagagaggagatctagagcctatcatatgaaatatcaacatgagctcaaccaagatgaatattcgatgaacatacctcatagcctgccttcaaggcatttgctgtttgtgatgggctttgtaattttttatattttcggaaattctgccgaaccagcggtttggtctcacccagccacggattgtctgcagttagaggtcgacattgtcggagaagtgctcgatagagtgccaaacctatcagagacagactgtcagctggaagtgcgggaaacgtagggaaatatctctcacaagcaaaacgatgagctccgttatacttgggcaccagcactttatgcattctgccgtgttgaaggttatactaataatgaagctaaagctaagtcttatctcatttctaccggccatcaccgcctgctgtaatgagctagcagaccagattaactaataggtactgcccaagacacataccgccttgaaccaaaggcacgtgaccaaaattgggtatatatacccgcccgcgcccccagaatctcttcttcttttctttcttcttcagctctctttgcctattggcttagatcaagtgtagtatctgttcttttcagtttaatctctgaaagtttccgtccaggaaacactttgattattcctatttttggatctcgcgacttggcccctgtgcttgcacatgcctcgttgcacagtgtcattgggcttacactacccccgatcgacgcgaacacctttttcatcaactgctcggcttgtccgggcgcttggagaagaagatcatgtagaggtaaatactattctcttgggcctaggacagtgtcccctcggagttgtttgtctggcgtcgccctgtctacccccatgttgtgccttttcatttttttggcatttggctcttggatcatcttatcctgcctccttcctgaagccccaggtttttttgacctctcttcgacctttagtctaagcgttcgtccccttgaatccctcgatccctttgtcctgtccccatgtttggtctaatgttccccgaccctaagttgcttcatgctagatagctaggaatcacgcatggaaataaaatgaatcatttctatgtcattccataaatgaagtaatagtagttagttattcatttttttatagttatcggtgcgcctgacgcaatgcccagtccagtttcacgaaaaaaacactttagagatgaagacctaatgtagggatgaaaattgaaagttggggcccaaaataacccctgccgatgctttcatgcagagactgtacacgctctagggtcatagaagaagagaagaagccaggaaatttaaatgaagcccaccgtcacatatgctggactagaaagtcgagccctccgggggctgcggcagcttcttatgctggggcaaggccatgtacctggactaagtgtcaacaccaactatcgcatcctctacaattctttgtgctcaccttcttaactcaatcagaaccgtctccatagtgttgtctcgtttccactgcgcaagggtaggaagctttgtcggatcgacctgtagtacaatcacttagtacataatggcttcgtgttttggtacccactctcctcataccttgccagagctgggatcaacacaggggatgttgactcgagaaacgaattgaacggtaggcgggttatcggggtagtcaggtccgcagtggatgttcacactgtatatccggttctcatggacgctctaaaagcggcagattagcgatagtttaatggtggaatggagaagacccagaaactaacgtgaggcggaccaaggatggttccattccagttgctcatcatcatatcctccccatcagcaagtccgtatgagcaggcatctaataataagaaagatacgtcagtgatctaagatcggacattatcggggatcgtaggacaatcgtacctgcactcagacccttctcgcccttctcgagctcctccagaaggcgaaagtttcttgggaccttggcggccatgttgaacaccgagtagtggtttcggaggctggaaatatcacgacaagtgtgaacagatgccaaagagggatgttgcgacaagaggggcaatgcgctgggcggtcaagtgggatcatgatcacgtgcgatatggcttatcggtggcttggcacctgttggagatgccacgccttgttgatcccatcgtggaatcgttgtactagcagaattgcagtcgttgttcccttgctgctcacatgaacttggaattaaagctcaaagtttgccactagtctggtgtaggaacaccgatctgttcatctgcaatcgagagctccctatactgttgacgtcgggagtgctggccatgctttgatgcaacaaacctatatcagaaatgtcctcccaattcttgcagacggagctcgccaatttgatacatgagtctcgaaggaaaaactccgatttgcgaaatgttggttatcactctctaggcgtcatcggccatggcacactaacgagaaactaacaggccgctgaacaatcattgaatgagctcaaagcactgccctcaacttcagaggctcagatagcagcaggtaattttctatatggcaaccatttgtcagttttcaaccgctaaaacggcattagatcttgttcgcaaaccgaatttcgtcgagccattcatcattgcatgctatactcggcatgcgaagcttgccggtattggtgtgatctgtttacagagactaattgcatctcggtcattaccctcgagccgtttgaaggatgttctcgggggcctgaaggagacaacgagcttgagtaaatgaccaaataaatcaaagcctctaaattgcgctaacgctttctaggtcttgatatccaactgaagattctacaatctctgccttcgcttttgcaattttattccaatgaattgagcggggagcttcttgcgaatacgttggaaatatgcgccacattacaggcaagcaaaacgattgcagtctctagtactgccgcggctactctccaacagctggtggtatcgacctttgaaagagtttcgagcgaagacagccttccgaaggatgtcaaaatcaccacaaccatcaaagtcgatggtcagtcgctcgacatcggctacttcgcctatgatgcactgcaagtattggatgatctctgtcgtctgattgatggtgagccactacagtttctgcgaacacgaaccctacccccgacctttgtactcgaacttatcgagagtattctcttgaacagcggccgtctttttgtgggacatcccgaactttcgcaagtgctgcgcgttcggttgttaccactagccgtccgttgtctatctgagaggtattcattcgctcaaaccgtccgagtcgctcgaattcttctcattcttctgaagcgtcatatgtctctcttgcccacagaatgtgagatggcattgagtctgataacccatctcgttgaaccggatgggacagcgccttggaagagactactctgcatggaaatcttccgagggctatactcggagccgggtactgtgcggctgatctacactttgtatgacagtgaggaaggcagaaagaacatccttcgtgaccacatggcggcacttgttcggctagcttcggagaagccttcgttgattggtgtcagtaatcaatcaacggtaccttcacgtgcagagcactcaagatcaaccacagaggatcagataactcttgaaactggcggtgttgctggtgtcattggatcaactgttcctccaagtgaaaccaaggtgcctggaattagcactcagtggagtgttgttcgtacgccatatatcgatctcctcgacaagacggaaccgcccacaccgccggacacttacatttacagcctggtccttaattgtatcagcagctttgctgaagggctcgcgaaattcattcttccattaacggtcccggatctcaagcaaagacgcaagaatcgacttatgagccccgttcagggacccgactccgctagatcttctcaagattttccagcagaacccatgcgagcgcagtctagctcgtcatcgaaaaaatcacatgttcccatcaatcctctggacctgcagtctcatgtacagtactccgccatcaagacttgcgcggggataatagagaactgttggcctgctgtcctagcagcttgttccacctttttgcgcgcatctttagatgacgagtattaccataatcttgttcgagcattccaaaagctagctcatgtggcgggtcttctgagattatccgttccccgagatgctttcttaacaactcttggaaaggctgctacgcctgtgagtggtgccaagtcacacaatgtgtctgccaccggctcccagcaaagtgacacaccccaaaagaaacggagaagtgcggatctgtcaagtctggccagttctttatcactggagcctactgcggtggaaggtcctcctgtgtctttaagtacgagaaacctactttgtatgcgggctttgcttaacctcggaattgctttggggccgacattggatcagccggcctggtctattatttttgaaacacttcaatatactggactggtgattggcatgtcctcaagtgcaatggtcaaatcggctagcggtaccggggagaccccagtcaccccaggaaacgatgttccaactgccaatcttgggactgaggtgattgcggttcaggcggcttctaacaaaatgctcgaaagcaccagcgatttcccaagtgcatcttttgaagaaatattacttgccttgttgaatctgtcagcattcaccgaacagtgtcgcaacatgaatgatgccccaggagtatcagacatacctcgaacaccgcaatcaccccaggcaggtggacgcttgcaccaaggttcccggcgcgtatcgcatactgtcggaaaatcaagaatgcaagacgaggaactcaaatttgtattggagaaagcaaatgaactagccaaggcaaatcttgggagactgtcttcgctcgagaaagatgacagcaaagcatgggggctactgacgcaaagtctcatctctacttccgcaaatactaccgtcagtccgaatcttcgcctgcaggcaagcgcgattttgaactcgatcgtattctcaacaatgaaacaaagggacgaagacgatgagaaagtctacaatcaagtgcagacgaggaatctgcagacattgaaagcccaggtcgcctcgctctatgcatcggacatgcacacgtccaagtctttgccaataaccgtcattgaaatccacgaacagaccttggaagtgttaaataatattctggaacagtatgcagaaactttcgtggacggatggaacctcatctttgatttaatatctggtgtttttcaacatgccccagatcctggacctggcgatcggccttctactctgatagagcgcagatcatcggctcttccagcaggcccccggttggtacgtgctgcctataagtctttgcatcttgtcgcatccgacttcctttctctgctaccagcgccctgtctcttaagcttggtgaatgccttctctagctttacgtcgcaaacccaagatttcaatatctccctcaccaccacctcgtttttctggaacgtttcggactttctccaggcccaaattgagcaaatctcagttgaccatgttgatgcgtctgtcagcgaagaagaactagctaaactagcacataaccaagacccttctgtttcccggaactcgctgtggctgctgctgctgcttcgcatcgttgatatcacgacagacagtcgacctgagattcgaaacagtgcagtccatacgcttctacgcatcttcgacgcctatgggcagcagctctcccccggggcgtggcgtctgtgcctaaacatggttctcttcaagatggctgagggaattgagacccctctcctccaagcgaagaacaaccgaagcagtacaaaacctgatgacttcaaggcgtgggtggatacaacagtggtgatgatcaagggtttatcaactctgatcaagaatttcttcgagacccttgtgcacgacgagaagttcgatcaatcctggaagcgacttttgaagtacctgcaaagtctgattgacttgcatattttggatttcagcgaagcaacattttctagcctctctgcgatcctcctccgggtgcagaatggatgtgaacttagcaacgatgctcttgagtgtgcgtggcttctatgggcaaatggccaccctgctagcgacgagaaggcgcttgacttagatcaacctaaccaggacgcggctttggcttatctacatacattccaacagatctatcgtctttacaaagatcagttgagtacgggacacattgaaaacgtccttcatcatctcagtttgctggtgtggaactcggtctccccgcgctactctccagatattgatcgaccctcggccttgcaagcgctagtcattgattgtatcaaaacgctctgcctggagaaagaggactcccagccgaatattctcttgtgtcttgccgaattatccgattcagcattatccaagtggagccccggcagcgacactcgaagaccaggattcgtggccttctcgaaacgcactatcgatcttgtcagctggtacattgccgaattcggcatcaagcaaaacgtcttcatgaatggtgctcttgcaaaatcactcgaacacctcagtactctaattgcggaaaagtacacatggcaagggaaggatcgcgagccgttcctatggcaaaaggccacaacagtatctctgaacgttctgcaagtcgctgtcccctacgtggaaaagcaatacacgaaggcaaacgagtccgaaacatctcagttctggcaacatattgttagcattacaaacggaattgtttccgcccgtggcttccaaacccaacaactccccaacgcccgaatcctcacagacgaagcattcgacatcaaagccttcacccgcctgaagaccctcatcctcccatccctcggcgcagcagcaatcccggacgccgtccgccgcgatttcgcccgcgctctcttcaactcctccttcatctacgctcccctccgcttcgacctacccaccggcctcgaagacgcacccctacaggacttctataccgtccgccccggccgcaccttcgacccaccgccgaccctgcgcccgggaatagcctatgtccttatagacacgctcttcgagctcgccgcacactcgcaagccgagaccgagacaaaagccgacgctccatccccgcagactctgctcgcccgctcgatctcgccctatctccttctgcgctgcgcggtctcgctcaagtcttacattgcagaccagcctttgcgtggcttgatgccccaacccacgcctgcccgcaaggccctgctccatctgctcatccgcatggtcgagctgaagagtgagccgtcggctatcccggatccgccttcgctgaagaccatctcgggtatctcgggtgaggatccggaggagcatcactatcggaagcatctcgagtggatttatccgttggttgtgcgcgctgtgcaggttgctggcaaggagcgcgatgatgggcagattctccaggcgctggggaaggtgttgcaggaaattggtcggtttgagtattagagctaatctggctgggtgtgtaccatgtaggcgattaatgcattgttttattttatactctagacttcacattctctcggaccaacacatcagaagtggtcacattctacaacctgaatctaagatgaggttcgatttggaatgaggcttggcacaagtgtaggcagagtaaggtatactacaaagtgatatcgtgacatagccgtgagacaggatcaacggacacaaaaggaatagtgagtagtagagtaaggaaaaatcgagatcagagacaagaggcgggtatagaagaacagatccgcaggtaccaagagactgtaagaaagaagcgagcgataatgagaatagaataggatagtctatgctgctggcgcgggaacaggccgaggctcctgccgaagcgacggggtgacttctctgccgggcccagcggtagcagagcccggtggaagagcgggctgctgacgctgttgctcgaggagcatctgctgttggatctgctgctgctgtgcgatctgggcgttcggggcgatctcgggagcttggcggtagagcgcgatctcggattgtttgaagtagcggcgggcgtctgttgttgggttagttttgagattggcattgaggtgtaggccaatggtgtgtcaggaatgggaggagcgtatggtaaattgtatcggtggggttgccaggaccagaagtggtttagcgtgggggtatcgggttttgaggggcaaatcggcaacaaaattgacgcaactcgggccgacttggatagttgtattgggtaacttcaattgccgacggctattgcattccgtctctacaccccgcattctgggatgcgtcatggactgatttgaggattgccaagaacgggggaaagaaggaagaaagaataggtaattagagcgtaccttcgtcgatcagtacgagactgagatagtaccttgtcgagtacttcttgttaacgtcgcggaatgtcggcgtcaagtcaaatccaccaaggaatagacggattggaatagtttcacctgtgaaaagttagtcatgctcaagattaccccaaacttcccaactctcgcgggaataataaagccgcagagtggtggccgtggccaggcccagatatttcaggggtgttcactaacctctcgatggagagccgtccataatctgcgctcatgttagcattcttatggctcgtatttcatagccgatatcacttcgagtacgttcaacaaatcacatacctcaaagcgcaccaatgtctcactctcattatattggtttggcggggatccagttgtctctcgccgaatgatagacaattccatatgcttgatcttgagccgcacgagcaagaaatagatacggccgacaatcacatccttgagatgatacttggatttggagtattcgaattcgatatgcaggcagtcctcaataccgacgtccatcttgatagggctgttgttctcaggtggcatgcggtacgagtacacccacaagtccttctcccgaatgacgtccgccatgcgccgtgagacagtcacccggacaaagtagcgcagcttaacgttgatgccattgtaggactcgtattgcttttcgacgttcttgaaattgaaggggaaggtctgcgggtggaggagctcgccgggcgcagcgagttcttggaccagggaaaggaattcatagtggttgcctcggtcgtagaacatctctgtattccaaatggaaaggtgttagcgttcagcctgcgatggcgaattcaggagaggctggtaggttcgacgcaccaatcgtgccaataaattggaccttgatccccgtgtgttccagtcgcttgccatccttcggtctgatagtcacggcacccttgacggactcgccgtccatgtacagagggacccgctcgcggcggcctttgtcgagcttgacatcgacggtctggcgctcatcgagatcttcgaggaccacatcgatgtcgaccggggtggagaagaagagtgaagccatggtggaggtaattgaggctgcagctatcgaggcccgaaccaataagtcggagctttgatgatctggagcttgtcgcggtggcctggaggtagcttacgtaataccgcctccccgcgccgcccccatgaactgatattcgacatgtttttgtatagaactggtgattggagtataagatctgaatgaatacctatatacgatatttgatactcttttaatctcgagctccacttgatctccccgggtctacttctggacctgactaccaaaggttataccactgatctacaactgtccgttgtaacttggactcttcaggcatgtcggatccactggcctcccaacattcccatttcccattcccaccgattggacctgaagcggtcttcgctgtcttttgaacatccaagcacacaacttagccatacggatcagaacagcacaccttctaagccacgtcgaataagcaggagatcggatatgtcggaatccgcttcccgtcagtcagcttgctctcatgaccatagacaaaacaatcggaaaatcagtgaatagccaagcaaggatccgactcgttgaccccgccggaagctgcatgccttcttccccggattctgagggaaagtaatggcctggtcatgcttaccgggcataccaggcttacctgggtatagtcggtgtgactgttggaatcaccatgcatattatttgctcatgttttcgtgtcctatcggacgaggatatattctccggaatgtctcccctgtgttccacgggattgagaatcggcaatccgtgtatgatctttcaagatcgggtggatctgcgaatctggaagaatgtggggggccgtttctctgtcgatttactgtcgacttcctgtcgacttataggaagtgagagataaagaatcttgaaatgacgcaggtacggaatcttagcgagaaggcaaagttccacccaaagtcagagaggagtagaaactcgataggagaagaactatccaatctggcggctttctagcgtgggggtgagttactgtaataccaataccgaataccgtgacatcatgatatttaggtgtttgatggtgtagtcaattgatagttatagcgaagtataagcagagaagacataatcttacattctagaagcaatggctattcgcttttggatatagtcagaagaagacaccccaattagcctaatatccctcatgtcctatccctatactatccctattctccccctatcctgaaccccaaatataaaggaccaataaccgtacgaatgtcgtctcccccactcggcttctgcttgaatcttttcttacccgacccaccgtgatacaatataagtacttagaacaggctctttgatttctgaaattttatttcagatctgaaagacctgttatagaacacttttcccgggtatcactacagcgtcatatctccacctcgacccaagttattacactggaaatccaaatacatccctaaaacgaacagcactttcctttcctctacaacatgctctccgcaggagaacgaccacagcctccccaagctcccgccatagtagattccaccgcaagcaaggcgcgcatcatgccggacctcgccaacggcaccaacggaaccaacggagtgacgtccactacgccctccaaacccgcgaaacagcaacatatctgggtcgtgaccggtccagcagggtgcggaaaaagcaccgtgggcaacgtcctacgcaaggagcttggtattccatttctagaaggcgacgacgtaagtacccaagtacctgaatgcaccacaccctacactccacacacccacaaaccacccaattgcacccaaacccaacaatcacccaagtatacacaaataactaacacaaccctcagtaccaccccgcagccaacaaagaaaaaatgggcgaaggcatcccactcacagacgaagaccgctgggactggctgatctccctgcgccaagccgcaatcgacgtgctctccccttcgaaagccaacaacttccacccacccgacggcgtggtagtagcgtgctccgcgctgaagcagaagtaccgggatgtgatgcgcgttgctgcgtacggctcgccctcggtgcatattcacttcatctacctcaagctcaaggaggatgtgctgatggagcgcgtcgcccatcgcgaatcacactacatgaagagtggtatggtacactcgcagctggcggttcttgaggagcccaaggacgagtgggatgctattactatcaatgttgagggcacgatggaggaggtgcagcagaatgttattcatgctgttactgataagcttgctgagtataaatgattgtttctctctctctccctctccccctctctctatcgttggattgaagggagtgaattcatttgtgtacttggtggttcgtgcgaaaatgggtatgatctatgcatggaggatttagcattgtgtttctgtcgatttttgtgcctccacaatggtgtttggtgttttggccggcttggctatgtcaccggtctgttttagatctggagttcttgatgaagctcgcatctcgggtttttatttcctgctgtttgatatatcaattgtctgcttggcaggcttcgtgatatcctttgatcaattgctctgtctttatcttttacatctcagtgtctctatacaatgtactaagaagctcaatctataagtattgaagccagcaactagataaaccaagtatgcagtgtctttagatatacccgtaatttgttattatttagatataacgaactactttgtcaagactcgtctaattcacctgagatttagaagcataagctcgggcgactcaaccaggtccttaaccctgttacccattttggccattgtcgcaccgtcaatgacgcggtgatccgcgctccaactgaagttaaccatatctccgcgtgtcacctgtccatcgtcatcaaagacgggcacagctctagtcctacccacgccgagaatagccacctccgttggcacaagcaccggagctacgtatgtgcctccaatattgccgatgttcgacacggtgatcgtgccaccactgagatcagcggggctcagctttccgctcttcccaagggcactcagccgcgcgatctcagcagcaatgtcgaagatcgagcgactggcgacgtccttgatattcggaacaatcagaccattcggtgtatccatagcaattccgatattgtgcttggcgcgcatgactagcttcggctttgcggggtccgtggtatcgactttggagttgagaattgggaactcggtcagagcctgtgagacggccttgacgacgaaagggaggaaagtgattttggtaggatcgtgtttgtcaaaggcaattttcttgcggatggcattgatgccgttgattttgagttcgtctgcgtaaagaaagtgtggaatgttcagggatttggtcattgttttgaacatctgtgattggatcggagtcaggttgacaattgactctgcttgccgtgtgtccggtgacacggagactgaggtgggcactgatgttggaagcgctggagaatctctctctgctacaaacttcagtacatcttctttcatcacccgcccgtcttttccggttccgttgatttcgaggatgttcacgccgtggcttttcaatagcccacgtactgcgggaactgcaagggatgcatgcttcgttttgggtatctcatcaggagctttgatagggggagaggttattagagaggattcgactgcttgagttgcagcttggatctcagaggccggggtaggttcagacggcgctgcccttgattcgtgcgccgggttatcatcggggtattttccatccgcaacctcgatgtcgcagagtgcctatcgaagcctgttagtacgttgactgcagtctgactttcagacaagcaagagtgaaggtagtacatacccttcccgtaggtactgtatcgtctgtctcgaagtgtagtttcttgattacaccctcatatctcgatgtaatctgggtttgttagtcgttaacccatagcagggaacgaaggaggcagcacccacatcatcgacagctttatccgactggtattggcacaaaggtttccattcctcaatatgagccccttcttctacgtaccattgaatgatctggacctcagtgatgcctggtaattgtaagtgaacaaattgaggaatgagttaggattatgaataaattaccctcgccgacgtccttgagaacttgtgatttgatctgccatagcagagagctggcatggaattttcgggacaagagcggaggtagggtggagcgaatgcggaggtgattctggggtagacaaggtctgaagttgcgggcagcaagtcccccactgcggctgaaacccattgtaaaaagggaacgtggtagagacagattcaagagaagttttctgaaattcctgaagagaaaaggagcattgtgtctattttatttggcattcgacactcgattgttctgcccgcacgccgacgctaaccgacgctacccacgtgatctccccgcatctatgcaagtatgggggaagtatggcattggcgttatctcatttctttgtatcttttcaaattgctagaaaactcttgttgcttggctctattgtgaagtaccaactcggaattgtcaagcaagtgaatatcactcaggttatatatggacagctaggcaatataagacgaagtagaccaagcaatctaccccagaaggcaattatatacgattagtagagagatttggagtaaatccatatggtacaaatgatggaattcagtctatttgactatagttaggtatagtaagccaaaatcctccctggatggctgagtgggtgagagacacgaggtcatctgtttgctgggtgaaacattgatcacgggtgataccgcattgggaaactcagcaatggtgaaactggtcagggtttcgatcctcgccaggagtagttggggtacggattctttttatatttttcttctttccttgtggtcgacagaccagcccaatacgagggtagcaccttccccatagggcaccttccaatgcccttacttgatatattgacatattggtttaggtatccatgggcaatgatgcaggtgatgctatctccgagatccactgctgtctatctcatgcaggtacggacattgggagttccaccgcagctttcagactccaccgaggatgttaccactctacccaaaattgagcttggagaaatataagattgctaacactgctatttggtttccaggccatgcttggcgggaaaacacaagggtgtacctagggaactaggtatctatcacgattgcaatgattcaacttgccctgtgagtcacccagatctggggtcgggtctcagccacaagcacgcccattcgtaatactctactaccggaagttctacttctgcaataaacaaggatatctcggagcttgcccgacttatgtccgcgtgtcaaatgtggagacgacatcaagatgatcgtcacaaccttaactcaatgcagaatccgaggccgacgctgcaaggtccgaaattcactagaccagacaccgaggcagtcaacgtggtacgtttattgcatgaaacgtttaattagttaataggtacgtacgtcaattgtgccgatcaagatgattacctaggtataagaacatcgtcggtcccccaactcctagtcttgtgcttcggaattccaattgcttcaatcttctgttttgcggtgatcccattatggctctcctgaccaagactctggtctcactggccttgggtgctgctgtcgcccaagctcagctttgggacaaggtcatccaaacctcttacggtcccgtcgaagggttccagtacttcaaccagtccaccctggataagtacttcgatggcgccgagtccaacgtcgccgctttcttgggtattcctttcgctgccgatacgggatatcagaaccggtggaaggcaccgcagccccgcgagtcatggaacaagaccttgaaggctacggactttggccctgcctgtcctagtaactcggcttccaatattagcgaagactgtctcagtctcaacatatggaccaacgcggagaccgctgatgccaaacttcctgtcatggtctggaaccaaggttccgacgaaaccagcaacaatgcgtggtactacggtggaggcatggccttgaagaatgtcattctcatcaccttcaaccgccgtgacgatgcattcggctatcttgctgcccctgagctcaatgaagagggctacaagctcactggccacaagacctctggtaactatggtatcttggatcaattggaagttctcaaatgggtgcagaagaatattgccaaatttggtggtgatcctgaccgcgtcactcttgctggtcaatctttcggctcttctcaggtctatcatgcagtcaatagccctctcttcacaggctacttccatggtggtatctcccagtccgggatcagatacccctacgataccatgctggctggcctcgccacctcatacgtcaacatgtctacggctatctccaatagcgctagctacatcaaggctcacaacgtttctacaattgaggagatgcgcacgctctccatggagagcttgttggttggttcttcggaccgcgttaccaacagctccatttggtgggtcaccgcactctccgccggttatcctctgatcttcaagcccgttctagacgactacgtgctcccatccaagtacattgaaacccttatcaatggccctgccaacgatgtccccgtgatcactggtaataccaaggacgaatctggtgcctctcccagtaccgactatactgttgccgagtacgagtactactgcggactcaagtacggaaacctatctagcaaatacttcaagctctacccagaccacaacaacggtaccattgcctctcgggcctggaacgctgctgcccgtgatctctctcttatcggctcttgggcctacgccactgcctggtacaagtctgccactgcgaacttctacacctactactggacccatgctcccccaagccaggaccaaggtgccttccaccaatctgagatcatgtatgcgctcggggctctgtacgccaattccgatacgtacgctttcaccgagatcgactttgagatccaggagaagatgtcgtcctactgggccaattttgcgaagactctcaaccccaacaatggtggctcctacaatggtagcaaatcgttgccgcattggagccccaacagtgccgagggtacccgggttgtcatggaactcggtaaccagtttgaaaatgtgcctattgcgaagccaaagcaggtggaattcatgatggactacttccaccagcaggttccctactagagagtctccctttagagtgacaagctctctagcaaacattagcccagtggttcaatgaatacctacatttacgtatgtagatatgtagtctatgtacactatgtttattgatgaagctagatccacggtatgcgtacaccgtaccaaggttattaagtcaatgacctcaatcagaataacccggagaatattggcaatattgaaccttcctctcattgtatacgatcccagacataatggcttcaatccaggtaaatgaaataagtgcgtacaatatataattgtgcggagtaagcctaggtatttcctaggtaactaactgaagtaccatattcatggaagatgccatagatgttcatgtcctgtccgcattagctagagccccctgagggccataataatactcacgtaagaacgataaacgcaagacctaacatagacacgaagccaagcttctttttcagctccccttggtgaccagatgggttgtccgagaaggaattttggaaaatactttgtgattccatgacctcctattctgtgatagctcttgaccacagtgcaaaggcagagagatcgtctgcaacaatatttacaagagagattcattccaagagagattccttgagcaagtaacggctcttgattttgggccgagttatgagatattgccaccgggtcaatagcctattcctcaaatgataaaccagccgtgacttcaagcacccttggttgcgatatgctttagtttgatcccagcaccttggggcaggcgaactgctgggaccaaccaggacggtttacaaggtatccatctatgcctccttttggtgtgtgtttgtggtgtacataacgctaggccgtagttagtttgactcggcccaagaaaattacgaaataggactgcttttgtcaatctccactccaaagttctccatcattagaacaaccaaagcaaaaacagggggagtaaattaccgagagcagagataaccgaatttcggcgaagcaagcgatagtggattcgacccaccctagagataggagttatctcgcggagaattgctcacccccgcatagaacttctactcccgaggtcgtcgaattcgccatggtatactttgaacgcgctatcttgtactgtgaggatcattgatgctactctcatagattacccgtgtgacatacagctttgatgtctcctcgacgtccctggtctaaatcggaagacgaaaaattgatcaagctcatcgggcagtttggggaccaacggggcagaaacagcaaatggcaagagatctccagaaatttacccgggagaacgaataaggtaggtcctcttcttttatgcatcgggctggcgtgccagagcatcgctgatatcaccatattcacaaggattgtcggaagcgttggtttcattctttagatccttctcttcgcaaaggacgctggacaaaggatgaagataggctcttgcttgatgcctatcaacgaattgggcctgcttggaaggatataggcaagtttttttctatccaatactcttacatgtccggcggctaagtgtacctctagcacttctcatcaaaggacgaaaggatgatcaatgtgcgaaaagatacaatgacatccttaatccccaagtgcaaaatcgtctcaaagtctggacacccgaggaagatcaatatttggcggccaaagtgaaacaactgggtcataaatggactgtcattgcagcaggcctacctggtcgtcctccgctgacctgccggaatcgatggagaaaactggccagaaatatctgtagtgacattggtttctctcaggaaaattcgccaatgccccaatcctctacggagaattcaaggacttcgccgtcgtctcagaactccgagatcttcatttcgtctcctgacgcatcgtctgaccccaccactatcgacctcctagatgccagagaggcatctaccgctctgccttctgattcttcccttttagatcttaccatgaatcagttagattggattgactgccttctttcaacccccacgaatatgtttctgagcccacaaccatctctacaatcacactatcaagttcctgggattacagatccttcattcacacccgcgaatgacaggtctccagatccacaaacagtcttgggaaatactctcgacggcgattctacagtcatacatcaagcctgtggcagcgcacatcaaatacatccgcctctgactcattccatgccaagcagcgaattagaggaagcctctgttcagcaagcaatatcttcatttattcaggacccaacttcagaaatgcataatcctgctgctggcagtatgcaacaccaggagcaccaccatattcatcatgttcatattcatcatcatcatcactatcatcaccattaaaacttttttgaatggtcaatctcagccatgatcaaacgtaaccttattgcatgaatcaagtgctcaattgcatttagctcttcatacctaagtctctcttatatatgaaaagcatggaatatacctgctcttgagaagcactttgtttctaggtgaggaaatggtaatattaactgatgaatgcagcccatcggggaagttgatgctacacaaagtctatttatgcagtcagaatttagtgtaactcgtcgatatttttttattggcttgagcagctcaggattctaccaacaggttaaagcagaaagttgtaatgtagtataaccatctacagaatgaagacgagaaagttaccaaaatcaaagatgatgaagtgtaggattgatggaaggtgaagatctagctactgtcatgaagctctctatatagctccatgctacaaagccgcaagatctcatcctctagcaaccagaagaagcatctctgcaggctcatataaagccaataccaacacagcaagctatctacagaggagtgaaagaaagggaaaggaatgccaaagaaaggtctaaaactgcatagtgcgatggtgagcttgtccaactgcgtcaagttgccggaaagaaattcaacaaaacagataattgcagagcgaagcgtcctcttctattgaaatcgaaaggaagatagtggacaaagtatcataaatggcttttgcagcaatcagtggccttgttttgttcttgagtctgagctggcgacaaggactgagtcggcgcttgataagcgacactctggttggccaactgattcgaaggcggcacgtcgttggtggggttgtatagggcaaagttgtagggcttaagatgcacctgagcgatttcagctggcatgatggggaagtcctcaacacgagggttatgcgtgaacccgaaagtatgccatatgacaatgtcctcatttcgcacactatcacgggcctcaagccacgacttgatgccggtacccccaagtgattggttggtgtaatcaccggccgggaatagctgccgatccttgtacttggtaacccagatggaatgctcacagaactcagatcggcgccagtgccagctaccgggtctggctagaagtaactagagtaagatcctaattagtagtcatagatatttaaagctgtccagtatcaaacttacctgagaccgaataggaacgagtttatatccgatcggggtcaatgagatcgggttctgcagtccttcatttaggatcttgaatactctacccttggaaaagtcgtcttcaacagggccagcacgatccagaatcttctcctcagtgacgtagcccgtaccaagagggttcaggtcatcgtcccacgggatcggaacagagtcagtcgacgcaaaactgttcgaatgacccccaacagcaggatcgatacgaatgttgaacaagtgttgatggtaaggagccatgacaccatcagcgacgcgagtgccccacgggacctttgcatccttatcaatcggctgagtagatagaattccagtggcgcgggtctcgaaggtgatttctccagactgatcaaaataccacatgtagatatattcgtagttggcgacggtaatgatagtctgcaggaccaactgacgcttccgcaccaccgtggcttttcctgtgcggtggttcgtgtgcttccactgaattccattgtcgatttcgtgcaagcagatagaattgggccgaagggcaggactgccatcagcagccacaacacagccatcgaaatacttgatcacgccgaggcagtcgcagccaagttgtagattgtttgccgtgacaccagcacccacattgccgagatcgaaagcgcccttgcggtagataggatttcgagggtcaccgtacggaacaaacatctctgaaagcgaaagccgatagaaggcgctcttgccatcaaatgagagatcgtgaagggttaagccttcacgccagttgaaacccacgcggaaacgccatttttcccactcgacaagctggcccatgacagtaaacgaagcaccttcgggttgcaagacctggtaaggcttcagggttgtacgaggagggttcttctgcaatcggtggtcgtattcgggctcgacgggttgggtacgacggtgtggaacagatgagccgacgggagtcgcggcttgatcacttcctagtggcagacggacgatcttctcgacttgcatagtgcagagattcacaatcaccatgaaatccaaagggaaacagtagtggtttgaatccggatcattgttctcggggtttcgcatgtacatgaaaacctaacgcggattgttgagtcaaaaaaagcttttgttgagactatagaccctgtcaaaacttacctgagtatggcgagtctgggtatcctcgccatcaactccatagtcccagggatcgaggaccacagtggtgtcgtcgatcttgagtctttggatttccgctttcacgcgtggatcggccatggtgacttgggcagcctcgttcatctcggatctgtcaacaggtccatggaagtctcgcgggagctcaacatgatgaacaaactgcttgttggtgacatcgacaatggcctcgaaaaggcgaggagatctcttgatataccagatgaggaatatgcaacgaggaatcgctgggagtggctgactgttgtgctcggcctccaaaaacttgacaagtatatccttcggtggctcttcgaggcctgcagccttgaagtgcagatctacaccttggtagctgcctttgaccaagtccgtagcaagttgaatctcttcgggaagagcggggtcaaggggatgagtggccatgatgacgaacaagcagagaatcgaagaaagaaaggttgaatggctgcagtgggtagaggaatggccgcatttttatcttaaccagcttcgcgagccgagtcaggtccatactccgctccgatcgtgtgtcaacgactgggtactatctatcgtctatggtgcgatgatacggggccatactcaaatggccctccacattatgccttggtggtcaaggatctgtgaattcttctagcataggccgagtcataatcagaaattcttcgacctcattcgttgaagaatccctgtccacttccgatcccgttctatgatttgtatgattgtggaaagttacctatccaaaatttatccgttaagggtgtaactgatcctgtcaggaattagccacttgcttacttcatgatatgaacaacactggacaaaccccagactgaagtccatcgggacacattccccaaaaaagtcctgagcacggcgtctgcgtgatatcgcgtgcacggccccttcctgactcggcccagtgccccacggtcaaacagaggtatatgtgcacgcctacacactccaccagcgaccaactgccaagtcgcgaaaagaagactcattcaccgagcccggtctgggcgatccagagggcgaattcccatccaaatggctctacggaaaagatcaactaaatgtgttcctggcctccgacctcgatttgctcgtgataatccttcctcaaacgcgtgacatgtgtggcatacttgaccgggagcaattcgcccttttcagcaagaggagggcctacgtgagtaaccccggtaggggcgcagtcatcaacacaaacgaactcattgaagcactggagtcgagtaagatccgtggagcagccctcgatgtcactgaccccgagcctttgccggctgaccacaagttgtggaaatacaataattttaccatcacgcctcactgcgctggaaactcgaaccactacactgaacgcgttctcaagatactggcgtacaatttggtaagacgagcgcagaacaaggaggttgtcaacagagtcaaaagtctttaagtctttaggatactagcttggcttcttgtcaggttttctttatcttagtgaagatctgaatagctttttcaatgatatgacgcttttaggaaacatacttcaattacaaaaactgaaccccacagctcaccgaaacccccattgaacactataccaatcaacatccatcaaaacaagccgtgacatattttgtaagatttcgaaaatactgatattgtctgttacctccgagcattcacatgggccgagtcgaacctgggatgactctgtccaatttctgtggcgaaaaagggcgaacgccggcctagaacatgaagaacgagggggcattgctcaaccctacgttatctaggccatgtggaatcttcaaagcttactccttcagattcaaagccgtccagtcgaagtcgatccatgccaatttgatattggaagcctaggtaaaaccagatagcatcaaaattgatgcaaggagccggcctccagtgctcaacgttccacctataatagcacgccaattgtgcagactaatttaatcacagcctccaccctcatctaggggtgtacagatataccccggtttctttacaggttgtgacgagacgttatgaagacgaaaaatgcctggtaatgataatagcgatacgtttgagatccagccgcgaacttgcctctgttatcaaatctgtcgatgtcgatctgtcgtatttaggccagatgactatatttcggtgtatgttgatgaggtatatgacattaagtgtgatcacgcattcactctctactgcgtttcgcccgtattttcttcgatatgtggctctatttctacgtagttctcggagttcagctcgcgagatatatctcatgtcagacccatgctctctgagaaagatagccttggtgcaagtgtggaatctgacttggcgcggggaaatcgaaatgccctaggaatacttatctcctgggtttattggattgcttcctcgggaatcctgaggttgcttatcattggctttgatctaatctgctagtgcctattcacgtatcccacctatcttgaaccttagcccgggccgagtcagtcagtttgcaggccttgctacctaattgattacactcaagcgctagtcgagtgtttctagtcagacttccaattgtataagggcttactatatatcagagaaacgcggcaaactaattcgcatctacgcagaacacccacaactccttactcaaccctcgaacaagacagagtccagactaccagtcgaaatatctatcaatatggctgatacgagccaaaacaatccaaaagatgtcaaagtgagccaggatgagcccaaagatatccaagggaccgtggaagaaggcgagatcagcaatggtcacttaagccgttcactttcacagcgacatttggtaagtagtttgctctcgaggctaactctccaactcaccatcaccccttcccaaatatgctgaattgaggtgtctgattttgacagatgatgatggccatcggtggtgtaattggacccggatattttgtgggaatgggaaccggcctatctaccgcaggaccagccggcctccttatttgtttctctgtcgttggaattctcctttggtttgtgatgcaatcacttggtgaattaggcgcctttatctcagtatcaggctcgttcacccattacagctccaggtttattgatccagcgtggggattcgctctgggctggaactacttctttctatggaccggtatcataatggcagaatacagtgcgtaaatcacaatcgaggacatttgctaacgctgtgaatactgtcattctaacaaaagcatcattgcagataacctcggattgattttaacatactgggatacatcgatgcctcgctggggctggactttggtcttttggtcaatactgcccccaaagcccaatgaaaataaatttgaagctaacctcctcttagggtttttttcatgtctttcgctttacttggtgtatgggcctttggtgaagcggaattctggctcgcattgctcaaggtactggctattgcaatatttttcctatgtgctattctgatctcctctggggtcattggtggccaaaagattggattcaaatactatgaagacccaggtccatttacaaatggggtgaaaggagtcttcgaaattttcgtttttgcggctctccaatacagtggcaccgaaatgatcggcctcacagcgggggaatctcaaaaccccaacaaggacattccaaaggcagtgaaaagcattatttggcgcatcgttgtcatctttctgggagggattttcttccttacaatcacagtcccatccaatgacccaaatctgctaagcgaaagcagtaaaacggctagctcacccttcgtcatcgcgttcaaccatgtaggggcaaaaaaaggtgctgatgctgtcaatgctgtcatcctactcaccatattctcagcagtgaacagtgctgtttatgtggggtcaaggactctgtatggactggccaaagaaggtgctgctcctaagatgttcctttacactgttcgaggcggcgttccgatagtggctttggttttcttccacctactcggattcctctcatttctcaatctgtcctctagtgcaggcgtggtgtacacctgggttatttcaatgacaggggttgcgacattcattacatgtcagtcttatattacatcccatgtcatccagagttctcttgctgatataacatgcttgaatagggggttcgatttgtttatgccacatacgcattcgcaaggcgatgcggcttcagaacgtttctgcgtctattttgccttaccaagcacagttttggccatatggtgcttatctaggatttggaatctcggtctttttcattttttttcaaggatggacatcgtttgcgccttggagcgtgcagaaattttttatgaattatgtcattgtcgtcgttttcattttcctcgccatatcgtggaaattctggcataaaacgagctgggtccaactgaacacggtggatttgatgagtggacggcgacacattggttgatgaagatagaacataccttcaacagtcctggattctctcatagcgccgatcacatccaccaatacaactcttttgacaatcaatcaaagttctatgaaccggatgcagtctcgctagttgcgcttcttccaaacagaagcaagaactcagttcgtactccataaaaccacccagaatagtaccatggggattcgcaaatcagaaagacgaagagtacttttcaacaaggaaaaagtcaaaacctgatagtcagtgtttatattgtcatcgctgtactttacttggtataagatgtcgctaccgtctaaagaagcgggggcaaacaaaaaggtgatgttgatggacgtaagtcaaaaaagcacctagaacctgaaattggcatacagaagtattgaacaattgattgctgaggtgaatcactctaaagaaacattgctgcaaatatagccaagggttcatttcgatgactctgagcttatgggaaccattttagccaagcactcggtcgtcgatagagattttcaatgccgagacgaactttagaaattccaaattcgactcccaagggtttctcctgaacctgtgcacgcacccaatcagccgtgatgcagtctctcgggctattttcgagtatccgaactgaatatccctgctaggcggcgttcccgtcggcaggtgttgatagaaagatatggatttttgtgttgctattagtgcgttattcttgttgcaatgccgttacaattccaagttttttttggcactatagagggatcaggctgatagtgttgaggtatcctgcgtgtagttatgcgagaagaggaagagagttgagattcccatgtaatgttacgacctgaaagatcagcggttacttcctatgattgttgaggagttccttcctgaccgaggagaagaacgttcttccctattgtgtaaaagggctaagcgaacgtattaagaattagggatttgcatatgtcaataaccaagattgttaccattgtgctaccattgcaacgattttgtattatatcgcagactgcaagcaagaatgctgatatggtgaattcttaaagctgcaatctaacagtgaactatcgacgcggataagacatgtatgattattattttctcttcggtagtcaacggtctaagttgattgttttaaatgaatagtatcggcttgcggtatgcgtggcagccgatgttctaccggagggtttcggactcataaaagagaaaaaaaccatatagatgatatattcctagacacatcatcattggaatgaaagatcaaacttccccttaggcattccttgactggccgtgacgttcttcaaccaaaacaagcccccaccttcattcaaagggtccccttctctgccgtcattcctagcactggtgactatgatttcattcatatcctggccaacccaagctccgtgtgtgactcggaaagcgttcaactcccatttttgaatgaactggcctctggggttgtatttttcaacaacagatccattccaaatgaaggtgaaaacgttccaatcgccgtcaacaatcagaccgtcaggttcgccagtttgcccacgtcgatcaatatggactcgttgatttttgatctctgcggtagttgaatcaaagtcgtacgcccagattatttgacgaaacgaatcggtgtggaacatgaccttgtgatcggatgtccagcctatcccatttgaacagactaccccttcatgttggattatgtggagagtctgatctggatcgtatcgatacaggccgccggtcggaacatatccttgtggaatttcgggacgcttcgaatcactggaacaacgagttaaataaaagcgaattgcataaggaagggaggggactcacgatccatcaagccagatatcaagagagccgaaccacaatcgccccatacaatccactgcactatcattcagccttgtcgtctttctatcatcaactttgatgaccttcaccaattctgtccagctcccatcatctcccagcatagcaagtgagttgaaggtgcagaggatgtatccgccttgtcggcaaaaattcatggaagccacagcctcagggaggttgatcgtcctccttgaatacggtatgcacgataggtcaagaacatgaatcgcatagccgagcacgtcgatgtagtggagcgtgttatcggacttcctgaatagaggactttcgcctagttcagtgtgtggctcaaggaatgccttgatggtctccatgctcgatatgctcgacaaactaagatgagttcagatttgtactgtgtatggcatttgaaaggcagcacgctgggatgagaaaagctatgtatagtacttgatagataaactccatggaatggggaagaaccgagtctggaacaggttacgggaccgcagtgctgactcggccctcatcggccccataattaatcaagctcgggagacatcattggtcagaattcacagatgtctttgctgattggctgacgcttatactctactttcgagtgactcttcttaaaaggtattgttatatatgataagcggtcggtgaaaagacaggtaaagaaatggtaacagccttggtttccgacgactatcactagtccgtttccggtattatctgggaaggagctatggactgttcttgtcgtattggaaggaaacgctcttttctgacacgcaagcgagataaaagtatatctaattttgtagggtttgtcgaaggacacacaaaaccgtgctctttgaatcctcgcttgtattttcttctcttcctcttcttcgtactcattgtttcgttagaaatgcagtctcaagcctgacaagatctagtatgtaacataacaataagtagttaccactttcaaatttaaaccttcaaaaccatacgattgtacggacctttattacgccctaggcctgcttcacccctacaacctgttacttagtaccgtagagctaaattgcgatcaatcaatcaatcagtcaaagttcgatttgttacgtgccaggtcttatagaacagaagagtgcatttctaacgaaacaataagtacgaagaagagaaagagaagaaaagaccaacgattattcgagatatttggttttgtacgcctcttgccaaatcatggaatctctaatgcgctggcttagctcgcttgcgtagcagaaagaaacgttcccttcttacatgggaaagaacgacccatcgatcttccagatcgtgaaaaccccaagtagtcctgtataaaaaggaaactatcaaaagaaatcaaaaatttgacggccatgagttgctattatgacatctgaatgctcagaaaggtcatggtctatcgaaaggtgtctcgctgcatcctttgcgagcttcttggaaggctttctcccgggcctccgaaagatacgccagagacccacggtcttttggtgacgggccatctggggtaggattgatattgaagttgaagatctgagttggtattccaacagaaacattcgcagtcggaatattgggcactgctaaaacttttgtttcaaccggagcagtagccagtagtgtgtaggcctgctcatgggagtatccgaagcgctgcagatagtccatagcgtgggtagcagcttggatgtatgaagtcgtcaaatcactgcgtttctgattgccttttttgtccactgagatgccatgaaaagcgagttgttggcggtacaatggctcggcaggactgggcaccacaatgggacagctcaatcctagtttctccattccacccggaaaaaccgagcatttgagcgtggcaataccggccatctcaatggcacatgtgggctcgccatcaccttgagaaaaatggagatccccgacggagagattcgctcccgggacgtagacagggaggtaaattcgagagccgccggtaaggcttccggcgtcgatattgccaccatgttcacgggcgggctttgttcttgcaccctctgttttgatcttgttcaaaaggttctctggaagcttttgtcccacaaaaaccccgttctcgacaggcatctgtgcacagaccactccgtggttttcgtggttttcgttgagggccccttctcgttctgaccaacgttgcagcagctcatgggaaggtgcagtgccgattactccacactgtggtctcccacaaaaggagacatcctttatatggcgagaagatgccattttcccatggaagtcccaaatactcttggccactcttgtttgaggctggtcaagaggcccaagtccgggatcaataagagagaacccccacattcggtctgggaatggctggacctctaaaatgtcaatgcagagcacatctccgggttgagcattggcaagaccccttacttatgttatgcggtcttcatatctgaaaatgtggcgctttggatgatgctcacgtataaaagaagccgggaatccccgtaccacccttccatgactcgacgcatcgaaatatcctaagattcttcaatattcattacctattctcttcgtcatgtcaaaggacaccaaacatccgtcagactccattgatacctcgcctgtcgatgactttcccgaaagaaacacgactttgggtgatctggagcatatgttgagagaccagcaatacttcagtcagagctacggtagacctggaatcaagtcttttgtgaagtcgcctgtcgttgtgctctgctcctgggcagcagctgtctgcgggtttctgtacggatacgaccaggggctcatcaatgtgactctgatcatcgatgattttctcaactcattcccggaggtaaatccagaacaatcacccagagcggctttctacaagggcttggtcacagcaatatttgaattgggtgcggtagtcggagctttgcaatccgcaatcttttgtgatcgcatctctcgtcgatatactatcatcgtggcggtgttttggtaccttgttggcagtgccctgcaagctggtgcagtgaattacacgatgttggtatttggacgcctgattgggggagtgggcgttggtagagcatcgatgattgcgccgctgtatatttcagaaattgctccaccgcacatccgtggggctctttacactctgcagcagtggatgctgattctgggaattgtatctgcatactataccacttacggtgctcggcatatttctggccattggtcttggcggaccgcatttgtcgctcaaatgcttcctggtacggttttgctaggaatcgtcttggtgttgcccttctctcctcgctggctgggcattaaagggagagaccaagaatgccttgaaactttgtcaaaacttcgttgccttccggagagtgatgcaaggattcaggcggagtggattaacatccgatgcgacattttactccaacaacgtctcaacggacgctggcgagagcactcgaccggaggttcttccttttggcagcaatgcaaagttgaggggcgaaaatggggaaactgtgtttcatcgcgatacatcaaacgcatttatatagggattgttctcaacgctttccaacaatgggttggtgtcaatggtttcacatattattcaaccactctttttgcgcagcttggttacgactatgagcagcgacttactttatcgggactcctttcgattgttcaactcattgggtccactgttccggtgttcattatcgatcgtatcggtaggagaccgctcctgcttttcggaacattcatgttgatgtcatgtcatatcatcaattccgtgatcgttggaatctcctatacggactggccagggcaccaggccagcgctaaagctggaacagcattcatgttccttttcatgttcttttttgaaacctcctggggtcccattgcctggggccttccaagtgagatccttccatctatcgtccgcgctgagggaatggcactcagtacggcatctaactggttgagcaactttgtcgtcgggcttatagtaccatctttggtcgctgccgccccctacggatcgttcgcactcttctcctgcacttctctgtgtgctttgatctgggtgttcttctttgtacccgagacaaagggaacaagcttggagggcctaagtcttctattcaaggacaatgtttatgaagaggaagcagctcaacgaaacgaactcatatcagaattgatccgaacgcatgctcccctgggacaatctgaaaagtaataggtcattttgtccaaacaagtcatggcaagcgttgatttatgactcccacagttccacagtagggaaatctatcacaactgtctgtatgatggcccgtcatgtgactctacggatcgtttgcttatttgcttgtttgcttgctaatctgcttgctcttcgtttgctatttttttattacggagcgaagcgaagcaattatatattttctttctttattcatacatgtcaaaccccaagaatgttaccattgctttgtatatcttttttacagaccgcttatgtgacatttatgtatccattttgcttcctaattgtgcccaaccaagttgtcaattttggaccgttgttagttcagtgagcaaaagatcttgagtgaaaatcgtggcaacgttattccacaagctaccgagtggcctcctctatccaaaacgcatccagaaattagcatttagtcaattcaaccacccaccatgctaccaatacgcccccgaagctctagaaatccaatagagcaagagggtaggatcttattagccatataggcttttaagaatcaagaaatatcctcaatttgtcaagtggcgcgccattttgctataccccgtacacctttcctggctttggacctccgcatgggtccctaccctggaacctccaaccgcccattaaactctagaggttcggtaaggttcaacctcggaggcgaaacaaccaggatcgaccgccaaattgatgacgctggcctttcgttaaggggacaatggtcaagagttctggtgaacaactacatttggatggggctagcgtggtgcattttattgaggtgagctgctgacttagctgctccccgcgctttgctccagtgagcacctgagcaattcagagcgctcagatgatgcccagtgagcgagcctgctgagtatggaacactcaggagcgtgctcagctgtacccagtgagcaaaaagcggcaaggtctgagcactataacggaaagagaaagccaagaagtggcagaggaaatcaaggcgcgacactaattgcctagatcgtacatcgcacatcgtactccgcacagatcttggaaatctccgctttgtcttacgatcgagatgtcctcgcgaatcagccttatgtgccaagaacaagggctcccctatcggagaccatccgctgatccctagtcgaggggtaacccactccagtctcagctcttcaggcagccaatttcaatccatatcgagacgaatcctttgcacagggacttgcgctgataccaatttcatctctgccaattgccaattcaccatggttgccgagtacctcactatccgcaacaacacctccactccacttgtcctgaagcgcattgagcgcttccaggcaccggagaaagttgcgttctatgccttcagtacaatggctagaaacgtcacccaggtcttgaccaaccaaacccgcagcctcgaggtctccccaatcgaacaggacagccgtcccttcgaggaaaagaatgttgacattaaactggagccattcgcactgaagaagaccgagctacgcgcctttgtcaactccgaaaaggagcgcatgcgtctactcttcgaagtcgaaggccacaaataccaaatccaagtcccggtaccaacaaaagagtccgcagaaatgaaagcgctaagcgagaaccccaaacaccgctttaccggcgtttccgtggccccagaatccttattggcaatattctcgtccgcaaacctgaacgcctggatgcgcgagctccgcgacgacatcctcgtctctgcgctctcaatcccaggcacgcacaactcgcccacatgttacatcgcgccgccctcggtgcgctgccaggctgtgagcccgaaagagcaactcgagaacggcgtgcgattcttcgacatccgcgtgcagccgcagtacccggatgacgcggcgcgcgacgagctgattctcgtacacagtgtgttccccgtctcgctgacgggaaacaagtacttccgcgacctgatgcgtgaagtcgacgggttcctcgaacgcaacccgtccgagacgctgatcgtctccgttaagcgggagggaaccggtaacgcgactgacgagcatgtgtcgcgcatcctgcacgaccactacgctaaggcgggcagtcggtggtgggtggggcccaagatcccgacgctaggtgaggcgcgtggtaaggttattcttatgcgtcggtttggattgcagcagaagctgaaggacgcgcacggtgggcatggttggggtattgatgctgctgagtgggaggacaatacccccaacgctaagtgccccagtggccagctctgcatccaggatttctacgaggtgctggagagtatgaatatcgagcaaaagattaagttcgtcgcagagcagattgatcgggctagctgctgtcgctatccgtttggcgttcagcccgatatgcatgcgacaaaggcattccccttttacgtcaattttttgagtgccagtaacttctggaagacgaatacttggcccgagaagattgctgctaaggtcaacccagctaccgtgcattatatctgtcgccgaggtaaagagcatgatgccgactgctcgacgggtattcttgttacggactgggttggtttgaatggagattgggatcttgtgcgctgcgttgtgggcatgaatgccaaactgcgtttgagacaggattagatgataaacatcgtttacatacatccggaggttaggaggaaatttgtcttttaggcgcggcatgcagggaatgcaatgattcatgggttaaacagagaatatgatgcactaaagttgatttcttacaagtatacattgaccctgaagtaggaagcgggggtcttgacgaaacgcagaatatcatctattatacaggaaaatgaatcagaatgatcatgaccagattaggacgattcgctcttgtcgccctccggtcccttctgctcttcttccaacacactccggcggctctccaaggtaaagtagatgctcttgccggctccctccaaagtagttgcaacgctagagctcatgctctgcaaggccatgacaagctgggagcggagaccgtccatgccaccctcgatgctgccgacccacttggtctgatcgatatcaaacacctggttgtccacacgggcagccagcaagttaatcttgctgagaccgttctgaacaatgggctcgtggtattccgggttcgccttgcgggtaggggccttgaagccggattccttgggggcaaggattgacagcgccgccttcatgtgttcaggcgagacgctaggaatggaaaggatagcaacagggccgacgagcagaggagaaagctcgtgcatgcccttcatgtttttcaccgcctcgtaggcagtgcgagacaagtcgtgtgtcaaggccgggtcgtcctttgagccggagagcgcagggatctcggcagaggtttgtgtcacggggtcaactgcacttggggggtttcctgcacccagagaagcctcgctgggtcggaagtactcgacaattcgcagagccgcctcaaagatgctggtctggatagtctggatcttaatgtaaggagcgagggcaggcgctgtccggccttcggcggcaatcttctcatccactttttgcagggcaagggttagttctcgtcggatggcggcccattccatggacttgaggttgttgtgttggaacagcacaatgagaggagatgtgcggagaagggaggtgtacgaccgtaggagctgcgaccggcggtattcgggattgcggtgcgacggtggctgagtaggagggaaccttgatacaggagctggtgagcgtgtcatctgctcaattgaagcagctggcgtgaatgctggggccgcagcactggatgcgctcctgataattcggagttcatattggcatcgagggatttgttgaagcgacgagattcttaaccgaggcggcattgtgattgttttaggtggtgaatttaccaatgcccaggaaattcaagaagttgatatacacaggtcaagataggtcgagacaagccccgggaaatgatatttttagggtcccaaaagggtaaagcgcttcggaggcggtgatgtatattgccgcctatatcgggctctcattgagtcacttgttatgatcttgcaggtatctttttaagcttgtggaacctcattgggattgctaggccactgtaaacatacagtcgcttacaaagatttcaagtatggcgacatctacatcctctccttctcagcggccggagtccatttcgatcgccccgctcctccagcgactcgcctaccccgccgctgccggtattcgagtcagcgcacaagatctcccagctgtgagtgcagaggagattgcttctgcctttgcactaatcttcgaggaccggctatctcaaattcaaaccgctgccctcctcacattgctccactcaaccggcaaggatagacaggcagatgtgattgcgaaatgttctcaatgcatgcgcgaggctgcttgccaagttgagaaaggtccgcttacgaagattatcaagtctcgtaatctgaaagcaggaaattaccagggtggattggtatgcgcatatgcacactccgtccattttgtcattgaggtatattgacagaccgcgatgtatagtgtgatattgttggaactggaggagattctcactcaacctttaacatttccacgacctcctcaatagttgcgtctcctcttctcatgacagctaaacatggcaaccgcgctcaaacatcgacctccggggccgccgatgtcctcaacgccatccagccattggcacccaagatcgcagccatcaccgctgacaacctggcccaggtctacgagaaaaccaactactcgttcttgtttgctccgaatttccacccgggcatgatgcattccaaccctgtccgcagggctctcggtctccgaacgattttcaacctgatgggccctttggcaaaccccgttgactgggcactggaagcgcgcgtagttggtgtggcataccagagccttggcccggtatttgccgaggccttcaaacaaagtggagcgaagaaagccatgattgtttgcggtgcagaggacatggacgaaatcagctgcgctggaaagacaaactgctggaggctctctgagtacccgaaccctgcatacaaagcatcagaagacgatgcagatgactcgagtgatgatgataccgacaatcctcgtacactcgtcaagatcgacaccttccagcttcagccatcggactttggcctctctactcatcccctcagtgatgtgggcggaggtaaaatgcccaagcaaaacgcggaaaagctgatgagcatacttcgaaatgagcttccacgggatgaccccatcttggagtttgtcctcatgaatgttgctggtctgcttgtcacctcgggaatttgcgaggcagataccagcaacatgggacctggcgatgatggtcaggtcatcaccgagcgtggccctgccggtggccgctggaaagaaggcgtgcgtcgcgcacgctgggcaatcgagagcgggcagtctctgaagcatttggagcaattcattgaagtaactaaccagctctgaagtaggattttgtgaaacttaggtagttgtaggcttggatttagaatgccttttcgggtctaagaagctttcggatttggggtatgcaattgtttcacctgttctgatgggtgagctgaatgtacctagatatttcgggtctatgagtgaatgtcattgaatctctgaaagcagatatgattggtttttttttagaaaaaagagcttaagcctgtcctccatacactagaggacatggccagaatatagtatctgttttgtacactgggaccatagaaaaaaccagtttgtgtcattcaacaccaaagcgccattgtatgcataattcgtcaaaagataaagatgtcaaaaccagaggatctcaggtcgattccgcctgggccatcgcaacctccgaacgtctggttcctgtcttaatagacaaaacggctaccgagcctggaactggaccatactattgagagaaagaaaaaagaagtcagcctgggcctcgcgcatatcgcatgataattcccaggaaagagaatcttaccgcttggtccgctctttgtacagcacacggtgaccgcagtccttgcagcggatctggtcgccgcgcttgagaggaacacgggcagagcactcgccgcacaggtaggtaactgaggggctgtcgatggccatggcactgccaaaacctccggcttgggtgtcgaagttgttctgggtgcccatcgcggggacctggtaagtttcgcgagacatcgtttgagattgagagtggcgtagtagtaaagtgattattttgcgcgcgagttgatcgtgtccagtggaaagataagagttgtgaggtggaaacgagctgcttctaagctgagatactcgggattctttttctttctagagcgcgggattttaggtgcttagtcatgcattccgtagattagtcatcgcgtccagatctccaccatttgggagtataaaagtcctctgattcttttagaaagtaggtttggaattctatgctctcataacttcattaattaatagcattgatcgtatttgaaggtatttataccttactcctatacatttatcgtgttataagccgagagcaattcagcccgccatgtatcatcgaccctaacttcaaaattatggtatatcccccagaaacatgcaagaaaaatcagatccccgcgctatgcaaaagaagtaaagaagaggctgctaagagaaccaccacaaagttgaatcatgcagcagcaaaatggagcagagaagagttaccaaccaccaccgatcttccctgcaagctccacaacccgactcgtatcattagcaggtgtttgatccttgccaacatcactttctaccttgcgatatgtagtatagacgagcttggagatggggatattcatgtattctgaccaggaccgcaagccttcatggattttagcctccttgtcagccaacgagaacagctgagactgagtctccagctcagtctcagactcagattccatggaataataagtctcgtcgacgcgagcaagccacgcgcgctgctcatgtggtgatggtttcatagatacgtctagtgcctctccttgggaaataccaaggatttctctggcgtcctcgactcggatctggccaccgccattcgtgcacccaccaggacaagccatgacctccacgtaagcgtagtctgatccagagctgcttgtggacacggcgttacgagatataggctggcgccgacctgcggcgggtctagcgacaggtctggcggcaggctttgcgccgggaagcctcgacatacgggcgggcttgagtttccggacaaggttttggatatttcggaaaccgtaatagcgagctgctttcaaaattgtttggccctcttgagacatgagcacgtactcgacgacatcgacattgcgtccgcggttgatcacaagttcgctgcctaaattgcgagcttggaaagtcatgagaacctgatgtaggtagcctccagaggtacctgcagcaagagttggttccgcccgagagcgcttgagggaaaggagagaaccgagggttttttcagggaagggcggtgtgaaagacaaaggcagaggttgcaaaggcaggtttgacagtgagaaccctcgagacgaagctagggatagaagctcacgtgcagtgataacacagtctacgtcgcgaaccggctgtgtctcagagcccgtggaatctccctgtcgccacgacacatctgtgagttcttctcgactggcttctagtttcttgtcaaagcagggcatgactgctaaatgccaaatccgcgaaggatggaccccgagggacttgctcaaaacggttttgaggaatgtccccgatagagcctgcggggacttgagtcgagaaaggtgtggaaggataaatgggtgagtcttttcagcgtagcaaatccacccaggacatgctgaggataaaataggtcgtttggggagagagtcatccgactggcccgcggttgttgagtcctctgagttgagggagtccgaaacctcgtctgcagtgagcactaacacagcctctcgcatggcattggtgtcgacaacccatgtaaatccattgccgtatttacccccaccccgcaagccctgcgggccactaagtaattggttgatcatattccccgcttctttctccgaaatcccataagttgtggctatactagccctgacttgcgggctgacactggccacgaagatcttgccctctccagagtcctcggtattattgactatcaccccatgatgctcatgcttcaagggaatctccggatgcgcgtcaagtgtattgaggacctctgcgtgagactggagtgatatcaacactgcttcggcagatgtaacacagccagagcaagcgagacagtctgtcaaagaaatctgtgcggggggtagatcctcggactggactttgtcttccgttgttacttcataggcgtcctataattagagaattagtaaaagaaactcaaataccacgcagttccaatgagataaatgagtggacatacttcttgattctttgtatcctttggtggaagggtttcaaccggtttgatacacgcgaccccgggcgaaatgaaatcattcagatcgtctgctgacaggatcgcgctcattgtggcggagtacgctttcggcggccgtgaatgcacagaaagaaatgactaaatttagccaatttgattgcaaggagtaatgagaatcaataaagacatcgaaaccttggaggatcaaaatagttcttcaagagggcgaatagttaagccaacggcgttgcatgctttgtcatggtggcgagatcggagatgatctcaccgccttatgcgggctgcacttgccttgattggtcagattggaactatgcacgtgacctgcttgatgtttctttcaacttcgacattctgtgagagttgcgactctttgtgttctcttatcttttcagttaatactatgtatataggtaactctactagcttacatgtagtcaatgaataagtaaatacagtccataaagagctactggaatgctcttcttcatcaaattatcaacttccctactgtttttctatcattaggccatgcgagcgcctgtccagtccgatacctccagatcgacacagtccaaacgatcaatagataccctgtacgccaatcaatcacccacaagcaaaagcaactgcagcagtagcggcctcactagagcgatgagtgacgttggtgttgatgttgacactggcgaccttaacacgccgcccgtcactatagtcggcttttcagatttcgtggcaagtcagcctggtgtacttgaagagcaagataaggtcgacacgtctcccctggctgggaaacgccctcctagtactcatggaaacaagggaagtggagtgaataaggtttcgcgcgatgaaatgtggcaggtcattacaacaacaacgaaagccgcgataggaattctgcacaaaacagaattggagggaactaagtttgcttatctggcgaacatatttaacgctccagtcctaggccttaaggcccctaacctcagggagtatccaaacctaaccactgtggttagggtcgaggcgggagacacatatgaccaagccctcaagatacacaatgctggcagcaccatcgatcttatgccagtatgtgttcttagctttgccaatggtgaaatgcccggtgggggctggctcaacggtgctcgagcgcaggaggaacagctctgctaccgaagcacactcgtttacactctccaccctcggttctacccaatgctagatcatgagtgcgtctattcacccaatgtgatcattttcagagatagcgcggataccggatatagcttcatgtcggcggatgacaagctacacatgaacccaactgtcagtgttgtcagcatggcagcgcgaagcagacctcaattgaccgccgaccaatccacgtacaaggacgtggcacagcgatatcttatgaaagcgaagatgcaattgattctacgcacggcagcacacaacaatcaccgccgcttggttctcggcgcccttggttgtggcgcgtttcgtcatccccctcaggaggtagccgactgctggaaagaagttctcatggatggagaattcagtggatggtttgagttgattcactttgcaatcagagactcaaacgctgagaataatcttgcaattttcacagagacattggatggtttgaacatgggataggtttaattccatttatctgtgttagcttcttccacttgggagaagtttggggtcttcttagacaggcgcaaattaaacaagaatcttctagtcaagttgtgtgttaaagaagtggcattgacagtacggaataaagcgagagtaaacccaaatttaaaatactgcctggcaatattaatcaatgggagggccatgctccgtgtcacgatatacttatagatcgccagtacttgacttcatacacctcacttagatgtacgtgtagatcgtctcctgccagcaacggcgggctttaccttctcctcttcaaagtactcactctttacagtggggttcttttgttttggggctcctcgcttctttgtctgtgttgtttcttccgcttcggactcgctttctttctttagagccacacgcttccgtttcgaattagccggtgtggattttgcaacttcttcatcaatatctttgccgacagaaccagtcttcttctggacagctggaacgacagcacttgttcgtcctccaacggtaaggaacgtgattttatccccattcggtagggcggcgggctggttcttctttccctttccccagcggtgtttgaaaagccagtgctcgggaaacttctctgaatctgccagtacaccaatagatgtagagcagacataatgaatggcagagtgcagcgccttgatctgatcatcattcaaagtgttgctgtattgctctgggtgtatcttggcatgatagagaatctcgtcgcttaatataattagcttatttcatggcttttgtttacctggaagacctaccccatccaatttccgattccactgatattcgcctggtcgagcagaaaagccttgatcggcactttcttcttccccagcttctctgtcaaccatgcttcattcacggtgtctttatcggcaaccggatcaggcccattttccttgagcggcgtatgattgcggatctcatcagcgggacaatccaccagtctaatgcgactaagcctgcgggcatccacaaatgctgcctctgttttcggctcgtcgcttgtctccagcaagaacttccaatatttaggaggccattcctgatctgccggcttgtcggttcgatagtagtatgtgtcggcatccttgatcttcaaccaaccagacatcccaaagtgcatcacagcgtgtggtggtgaagacattgtgagccagaaatattttccttgttggcctgctcccacaatccttttcccttgcattgcagtttgaaattcggaggcactagtgccaactttgccaaatacaatatcatcatgttgggcttggactttagacagtgtttttccaaccagatgctcacgaatgaaatgcacaatgcggtagatctctgctagttcaggcattttggtatgatgcttccagtttcagtagtaaaagcatgtaataaatgaattcaaaggcaaatacaagtgcttttttcccgaaagacgatctggcataagcagacgcgatgctcctaaacgcgggtcgcgttgtcacgtgcatatagttgaacaggctagtcctaaaacggactggtgcttaaggcttgattacggcatgacgacggtggttgacggagactttgctcgggctattcatgaatgttaccaacaactagtatcagttcgttattctgctcattgcagtctatactaggcctcagtgagatatattcagcatcacaagtatcaaagatacgcttataacgccattggacgacctaccttcatcaaatacgcctactcacatccttactacaaactggagtggttttgggccaagccgaatcgagaagctggcgagcacactggtaggagcatgtcgcaaccctcatctacagctcctccggcgctgacgcctcggttctgttttgacgagagactactcagaggttcgttcgaaatatgacatcttgataccggcttatattgactttactatttcctctttctgttcagattttctccgactctcaagatctacgatcgatgactcgattacacagaacttgaacgcgttgattacaccagcccagagaggatttgacccagcatcaacagcggtgcgacaacccgagtctggctctcggatcaactccgcagcgtgtcagaactttaaagataatgtgttattcccgtcatggcaaacgagatcagacgttctcacttattgcgctggtgtggctacgagtccggatcccgacgatcccgacttgattcttcggcagacagaatccgcccgagaccgggaacgagaagttgatgagcgtctggacccctactccgctcgtttctttccacgtgaaccacggactgagtcattggccaatttaattcgcaatgagcgcacggtcgaagagatcgttcgggcccgaacgtgggggatggtgtcagaaaaatgcaatggatcttcttctacttgggaagaagctctcaattcctggcgccattcccatcagaaatgaatcctccagcaggagcgtgccgcagtatactaggatcactatataactcaactcttctttagactcgggaaggcctcatcccaaattgtacagatttgcacagatccgacattatcatatccgtttatttgcatcttcactttgcttgcagtagaatacattactttaagaaactgaggaatcctttctagctcaaactttttgtgctcttaagacagtgaaaatttgcactacagtacataacaaaccacgtgcgcatcacgagatgtgcattttgccccctattgacttcaggtatatatggtcaatggttatacgtattcaacctggtttacaaccaaaattttacttgtgaagaagtcggctgctcgctatcttatcggaccattagctctgccaagatcggactcggagaggtcgtcccccgcacacatcgattcctcactcgcacaagtcaggtccctcgacgtcagcatcgcccacaatgccggaaacattgagcaccaaggaccattccttgtttcgtcaagtggttcaccactttgagatgaaacagtataagaaaggttggcctccgaaacgaccctgaactacctaggcttgtctaaccacgttttactttacaggtatcaaaatagcagaccaggtccttcgcaaaaatccgaaacatggcgacacgcaagccatgaaggcgttgaatatgagccagatagggcaattggaggacgcctttgcgcttgccaagaaggctctccagaatgatatgaagtcgcatatcacctggcacgtgtatgggttgctattacgccaggagaagaactacgaggaggccatcaaagcataccgatttgccctgcgtctggagcctgaatcgcaaccaattcagcgtgatctggcactgctccagatgcagatgcgggactaccaaggatacattcggagccgcagtgcgatgctgcaaactcgtccgggcttccgccagaactggacggcgctcgctatcgcccatcacttggccggggatttggcagaggccgagaaagttctgactacctacgaggacacattgaagggtgccataccacatgtcgctgatatggagaactcggaggccaccttgtacaagaacacgatcattgctgagactggaaacctcgaaagagctctagagcaccttgaggctgttggataccgatgcactgatgtgctcgcagtcatggagatgaaggccgattaccttttgcgactggaccgcaaggcggaggcggagggcgcatatacagctctcctagagcgcaacccggacaactcgatttactacaatggcttgatcaaggcaaaggatatccccgaaagcgaccacaaggcattgaaagctctatacgatgagtgggtgaagaagaatccccgctgtgatgctgctcgtcgcattcctctcgatttcctagaaggagacgatttcaagcaggctgctgacgtctatctgcagcgcatgctgaagaagggtgttccttcattattcgtgaacatcaagcagctttacgttaacccggccaagcgtgatgtagtacaggaattggtggagggatatctctccgaaaagacggcaaatggatccgcggagtcgaacggggacaacaacgagttcctgtcatgcacatactacttcctggctcaacactacaactatcacctcagccgcaacctccccaaggccatggaaaacgttgagaaggcaattgaactgtcgccgaagtctgtagaatatcagatgaccaaggcgcggatctggaagcactacgggaatccagagaaggcagcagaagaaatggagaaggctcgactgctagacgagaaagatcgtcatatcaacaccaaggcggccaaatacgtgctccgaaacaacgataacgagaaggctctggacctcatgagcaaattcactcgcaacgagaccgtcggtggcacattgggtgatctccatgagatgcaatgcacctggttcttgaccgaggacgccgaggcgttcctccgacagaagaagcttggtcttgccctgaagcgcttccactcggtttacggcatctttgatacgtggcaggaagatcagttcgacttccacggcttctctctccgcaaaggaatgattagggcctacgtggacatggtgcgctgggaagaccgcctgcgtgagcatcccttttatacaagaatggctctcggtgccgtccaggcccacctacttcttcatgaccagccggacctcgtgcatggaccgatgcctagtggaattaatgggatcgattctactgatgagaaccagaggaagaaggctctcaagaaggccaagaaggagcagcagcgcttggaaaagatcgaatccgacaagcgtgcagcaaggaaggcagctgccgctaatgccaagggtgctgacggggagactaaaaaggaggataccgatcctctgggcaacgccttagtccagactcaggatcccatgaaggatgccatgaagttcttgacgccgttgcttgattcaagccctcagaacatcgaagcccagtgcctcgggtttgaggtttactccagaaggagtgagttgatatggtagattctaataccggacgggaccctcatgctaatacgattatagacaagcatctcctcgccgtcaagtgcctcgtggccgcccattccatcgatccctccaaccccactctccaccttcaattgcttcgcttccgcaagtctcttgagagccttgccgagcctcttcccgaacaggttgccgaggttgtcaatgccgaatttgacaagctgcttccaaagacccacaaactcgacgagtggaacgagtcttacctctcggctaacaagggcagtgtggcacacgtgcaggccggtttgtctgcccgtcaactcctgaaccctgaatccaagccgcagtgcgaacaagatctgcttgctaccctcgattcccccgatatcactatcgacgaggctgtcactgccttggacattttgaacaagtggggcagtgataagactgcttacgccgagaaggcgggcaagaagtggcccgagtcttcggtctttaagctgaactgatttgatacgaatggagaaccgtgtggactcccacccccatccccgcttcgatcatgagttgcctagctgcctagcaatataaggagttaggacaacaaaataaggttacagacatagagaaagacacgggatgagcaaatatactctggtattggccgatgctaagtgcagtgagtatacaggtgctgggagaatccaatgtaccagtacaatcaagccagggctaatcgtagattaatctactccaaaattcaaaatcactgtttctatcaatgtacatttctaaaatcggaccttcaaacgccttattatacaagccgaggagggagtcacaatatgctaaacaaaaagaccaacacatgccgtgctgaatgccagggaagaatccatcccgtaaccgttatagtatataacataatttcaaattgtgaagatcagacagaagacgtctgaatatctcttcactgttcgtcttctccgtcgatgttacccaaaatgggcttacgtctcaggacctcgtcactctcgccgtagccgtaatcgatccacatgcgcttccagaaaggcacgtgagccggtcgctcttcgccaagaatgtattcctgttgctcggcgatgcgttgagaacgcgcctcatcttccggagaaagggtggcgcgctgcatgcgcgaggcaatgcgcggatcaagcacgatatcgtcgagccactcgcgttccttcacgttctcgtcttcatcgcgcttgtgcacagacttgtgccactcaatttcagcagcctccattacggtctgctgctcatagttgcgaggggggaggtcggtgaacgagctgtcaagagaaagggtgggttcgctggcggaagtggactcggaatctgcgataaaggtgtcttcgcggtatggccgtgcgctattcgcgaggacgagtgcggcaacatcgcgcccgacgtcctcggcaaggtaacgttgtgtgaggaagcggtacattcggatcggggtgttcaggaagccaaggagatgggggaattcaactggggtggagctgtcgaaggactgggggatggtgttggggagggtggcggaggagtattcgctggggtagatgtatgcaggagtaggaccagctggcttggcaggcttctcttcttctttcttttcttccttctcgggttcctcgatcttaggcgctgggatctcgtcctttttctcttcggagaactcgggggaatcgatgctcgcaatctcagggaccgcgagactagcgggtttctctgcactgacgtcctgcgatagatctacgctcaactcctccgcaggcggaagcggcgcatccaagggcccgagccaaccctcatgcaagccccggatatactccttccaggtgtgccggccgatgatcaagtcgcccttggggcccggttcgtcagtgaccccaatgtgtgcccgggtagcagcaacgactgcatccacgccgacctcttcgggcgctgagctgggctctccggcctttcggcgcagtttgcgaatgttttccgccgtgttgaatctcacgtcgccctcacgtcgcccttcgaccactgtgtaatccagcgccgcggccactaggatgggcttgacatattccttgaagtgatcccgagccacacgaagaccatctcccggtggcgcagcaagatataccgtcatcttccggcgcatttggtcgactggcagagtttctttcgaaatgtgggccacgagctccgaccacttttgttgcacgcgacgcttctcccgacgatcgtatataagagcaccagcgaatgatccagtgatagtaaagaagatcatccagttgcgagagggcagtttgaaccgcatattaggaaggcctattaatcacagcagtattagcatttttaccactcgaatctggggaacagagacatacccatcattttgaatactgggttaggcggcttcggggccaccgggggcttgccagtgccctcgggcgcggcagagctcgaggaatctgccattgggctgtatgatggagaaatggcttatacgtataaataaagtacacccggggcatgctcgttcggggaaaattgttgcctcgggattaccttatcccgactacacgtgacttggtatcagactcggatcgggtcgcgacatgtgaaatgtaaataaacggcacgctgtcacgtaacctaccttcaatgccgccgacataaaagacccgtctttgctctttatcaccggcgaacgtctttattcacataacctcgcagcctttttagaaaggtacacctgtacctggaaggtctctggtttctggagcggcacttcctagagtaaatcaagctcctcgattgccgcttaaaagcccaattgtaccagtcttataacctatttaatgcgcctatacaatgagaataacatatataatgtaaagctacgtgttattcgatgttctctgtttctgtttttttatcagagaaatcgagtgtgaatgtcaacggggcatagtagaaactgctctgaaaagaaatgtcgttagcatgctttataactcgagaggcctgataccagttgagaaaactccgaaaatctttctataacgaaaaggaaatcggtgagtattggtggtggtatatatactacttcggccctagctttcttattcagtgtagtaaaaaagtaggcaaaaaaatgtgagaattcttttagtatagtactatctctactatctccccttaactgataggtatatagaaacaattcccgtttcccgctagatactattattgtatacaccctgtataggaaccctcctactgtaaagccttatcccgcccttaatgaggccgtggtccatttgctaattataggtaagttttctgacaagttcttactataagacgtttaaaagtagggggaatcccctgccatagaatatattgtgcttaaggtatggcgaccttttagtactgaagcggtcactgaggaggctctcgtgagcctaaacgaataaaaggctaactctgtaaatcgtatgctaactttctaacccattcgcgaactctagttccctcttctgctgaatcattttggcgtagtattacccacgtagatacttaaggtcctggtgctttgttggttaataataggttattagccgctaaagtatatgttttagtatgatcccattcctactccttgctcgtcttctatggcccgatcaaacaaatcttcgaagtcgttgctacaccgaaagactgcaagattccccgctggatataactgaagcggttgcggcttaagcgaactagcgactgccctggaacggctcgctggtatgatcttttggtctaattgttaattataagaaacgagatttttatactccctgtttaagtttggcagtaatcagttattaaaaccacccttttcagtttggtatcgctgccctaggcggggtacctttctccaaaatagtcatgtagtcatataccacgtcggttacattcgggatttaaggcactatgtattttctacccccttttcagtggtaatcatggctaaggcttcctgtccacagcccccttcttccatacggagcattcccccatactgtggctgtgcttaatatactgacctaaaatgcgagcctgagctatatcagcctcagaaccagatatataaaccctttgttttcccttgtctaattcttccttagacctcggacgtaaggaagtctatttcccactcttcaatgtgcttcacacaatcctcggttacccttaatccaccacgactttcctcggttggttcttgtattattttcttgaaagaaatacgcgctaatctgtcttgcctcggtctagattgtcaagaatgtcaacatcctccagcctcagaaaagccaagttgatgaggcgctggaaaaaagccgggattgttggtgtcacctcgcatcactagcctgcgcctatcgggatcatggcttgactccggagtatacaaacccgcgcctcatcctctataggataccaaaattctaaggccggcccagaaaagtccatgttcgcccttatggtgtctctccaattcctgtgctttgtatgggcctcttctacttggaaattggtaggaaacccgaactgctatatgatcgagaaagaaattacaaattctgccctactgaagattggtatcggtgttgctacttcttacggtctttgtgggagaatcttcagttcttggattggtataacagaagagagtcacgccggtcccaattatctagggattctcacagttacatggtgttatatactctctgcgctgctcgttgaaattcaaggggagggcgctagtacgtattatacaatctctgagaccgatggtgaaaccctctccgatcccctacagatatatacccttgacgttggggaagcgaatgataatgtggctcgatggtggtatgtgatactcgtttaatatgaagggtggagagcgatagtgaaataaattcccgaaggtgaattcctagtactatgggcggtgtcccgcacgtgtcaaacacgcctcagaatcaaacagaagagatactcgccggctttagcttgctctcctttaactttagaacaaacctttgatgcccttactgagtttgcgtgtttccgtgaactgggtagccaatcacctattactcttatgacagctataacgtttctaatgcattaacactatggctcaactgtctaactaccatttctaatagtcactggtggtaaactgcgcacggttcctatttcgtagatatggttaagtttaattagagacctgccctactatatgaccctaagctgtagtccggaagtagtgatgtcgattctttacagatcattctgggaacttgaagtaccttataatctctttaacccttggttgtatctagttcttaacgagatactaagtggaacttctggcacgtaacaatgattacgaaatacttgctttaatggatgcaatatattgaccaaatattagcgctcactggatcggggtagcgataagcgagttagccctaaaaatcatttaaaaggtaagaagataagaagaggtaggcctcctcttgacgcacttgcctttccctggactggttgtccttaaagctttatagatactgtaggcttaggtccatatacttgtgtgaatgcggaatacatttcaaggccagacgtgtggcgttttctccacctccctctaaacgaggacgatgacttatgctattgcaatagatcctatataccctgggcaccctgtgggatctctaaaacaaaagattgcgctcttcgtgtgacttcgcacttgaaatgcaatcgatatgagtaccattaccactactagaaccgggacacagaagaaggagcgattctttaggaccatggattttcaacgacagatggtttgatgcattctgaggagctcactgtcgctccatgcagtttgtagaccttctgtgtggcattcctttccctttctttctcttctctgacagacagctcaccggcaaacgcgcagcttgccgcgtcgacgctttcctttgtatgtctgcagagatgcttctcctgtgttctggtaggtagaatctggctgccttggtagtacgaagctatatagacaggcttcggtacagtagctagtttcgcatcttccatcaacacatcttccatcaacatctcctggttgatcacttcttccctcgtagtcagaacctctcatcaatcgctgatcaagtcacaaggtacgtgaaaacaaacattctgtcggatgagacgttcaaacatgtttcaagtgttggagtagagtttgcacaggcggaagacgcagcgcagtgcctgatgagaatcctcggcgacaggagtatcaacgggcattctttactcgtctcaggaagaaaatgggcttccagtggatacattgatctggatctggaagactacccaagcaatgcgttgattcgcgagatccaaggggaccaaataaaatcagctcctgttgagcttggattatttttgtgagcagcaacaaaactggctcaaagtgatgccaccgtgggaccaagctcttggtctctttattcggtgttttgcatttgcaaatcccgatatcgtttgttctcatggcagtggcatgtcataaccaggctgcaatgtgggatacggcatatccggaagccccatacactcattgagtatgtcatctgtgcttatgttccaaaggaagtccggccataagtctgtatcatctacctgtgcaacttgtgtggcgccataattttcacccatcaggggaacatcttgcgagattgcgctattggccaaagtagagggcccgaagccgccatcggataatcctgtaggtatttgggctgtatcttcagaaggcaccaggtgatacttttgctcgaaccattcaaggatatgccacagccatgcctcgtagaagtacttagagtgctgtttcccatctacagccactctgtccttgctgagccattggattagttgtaacacagtccgcaaaatgtgtggcatgttcaaatccgagcaaagggcacgaacatgtggactgcgtggggcgtattttgcccccatgatggccagtttgcagcctagaaccaagttaaagcctgattgcagccattgggtatgactgatcagccgatgagtattcggagcaaatgtgaaaaagtaatcaaagaatttctttgcttcggtcatgccgcggttgagaaattcgacctggaagggtgataagtctaacggttggtggccacttttgaggtgtggtggtagccctgagtctgcatgggagcgaggcgcgggcgaagccgaatggttggctgtttcatgtttatcaaataagcaagcctggcatagaaacaattgaagagtgtgtagttgaaattgaaggagggctaaaccgtgggccgtgagttagcaatagtttcagcgtaatcaatcaaattcacaagcggtgtcacttacaattgtccgaaggcgttgccggcaaggtcgttctgtattcgttgatttcgatttggaatgcatgcatatcaacctctcgtactggattcgcagtagtggccacagcatcatcgatccgttcaaagatttgttgtaattttactaattgtactaagcagcgatcactggcaatctcagcattggatagtaatccaagtgcatgcttttcaacataggacagccgagtcatcatgcgatccttttgcaatattgtcgagtgactgcagacacccatacccagtcagtaatatgagggggatatgggcattgttactgaccatgaggatagcatgtaacatccaatcaaagctcgtcttctctcgttcaccgaatgtctactactgttttcatctgaagagaccttgctcatagccatccgtgaatagtatgaatgggtttccgacaaccggtcaagccgcaaatcaccgacgatactccaagcaagatgaatgtagctgcaaaatctttcatgctgggactgatgctgcaacctgggatattgaggctttgagtcagtagtgtcatcttcaataaaaccacgttggattagactcaccatgccaaagccacaagaagtcccagcaataaatccatagatggattataggcgaagatcatctgatcagcaactgctttttgaaatgtctcttccaatatctgctgagaggctgcattcttgtatgatgagaccttgaggatagccagcaagagaagcggtttctctgctcgcagctgcgcaagcgtcacttccggtgcgatatagataaaagggaaaaatggcatcaaggtttctcgaaaagattcaagaatcgtgacggcatcatcaaatctcacgatcccgcgatcaataacatctcggggtttatccgggatggaatgaggttctgggtcagacaggactaaagaaacatcagcctggtgttgagtgtgctgcttattgacgactcgagctaagagctgatccactttggcttcgagagcctcgactcgtctgattttttaagcttccgtcagcttggattcacagtcacgaatcaaatgggatttgggagccttacgtccccttcttagcggggttgtaacgaggtcgagcgggccgaaaatagcactctttgccaaggcggcgacatctgagctcttatattagcatatggttatagttgagaataaacatgatgttcgagttccactacttgccgatcacagatagaggaatccgaagttcggatacatcggattttgccacgagcacaattttgacatgttttgatgtgtcctgacatagattccatgttccaaattggtatagtcacggtgaaaggagcatcaggacgaggcgagttgaagaggataaggataaggacacggacaaggacacggacacggacaaggatacggtcgaagggcaaagtcttggcatcggtggcccgccaggcaacggctttactagggatccactacatcgtatcaatcttgatggcaagttgattattggtttgactatggattcgaaggatttgggagtgagattatctcaagttgaagctttaaaatacccacacagcctcgtaatgatcattaactatggataggcagcgtcaaacacctttgggtctgcacataaatagtgccgaatctagcatggatttgctgatatcaatttaaccacagcactcattctcttcaaagtgatttgatctactatatttcccaagcctctttactattgcgtgatcatgtccaattcggataattgcactttgcagacatgtcctttagatgatgcttatatccagtatcagcctaacatggctggaaacatcttctacctcgctcttttcgcaatcatactcattggacagatcggtacgggtatcgtatttcgatcttggactttcatggtgccaatggtcgcgggccttatattggaggtcataggatatctgggccgaattctcttacatgataaccctttcaacttcgatgatttcttgatgtgggttactgagcctaccacataattgaatgtatgctgaccgaggcgtgatgcattaggtatctgatatgtctcaccattgccccggcattcttcacggctggaatctatctatgcctcggtcgtattgttacagtttacggcgaagagttctcacgcttaaaaccaagaacctatacctacttgttcgtgacttgcgatctgatttctctgatcttgcaagcggccggtggagccatcacttcaattgccgaagaacagtcacttcgcgatactggtgtcaacatcatgatcgctggactagtctttcaagttgtatcactagtagtgttctctattctagccattgagtatggagttcgggttttaagagggagacgcctgcattcccctactcaggaacgaccgacaagctggatgaggagatcgttcttgcttggtaagtaaaccacctcgatcttttctatgggcattccactgactcgagtttcattatcaggtttaacaactgccgttctaactatattgatccgatcttcattccgagtggccgagcttcagggtggattccacagtaaattggccaacgacgaaatagccttgatgatcctcgaaggcgctatggtttcaattgcgtgcatttgcttgaccggtctacatcccgctttgcttgtgggtaagaactgggggacgcctaaagcaattgcacgagacttggaaatggaagataaataagccacaaaaacaagagggactgacgctggttatggacctgttgggtcggcggtttttcagccgccaaggataatcatggtgcatacaacaatgctttttggatatcatttgaggttatggaatagctatgttaagtctttgtacggaagtcactgattcgattgaatgcaatatctattcccccatgttattcttagttataagacttttcccgaccaagtaagcactcacttttgccaataacgttcgacgacagcgataccttctaaggtctttagcttaaagtttagagggagccatctaagactgcgaaaatgttccagtctggctcgagtttcctcgcaaagaatgggatcggtctagtattggtgctcatcggtttgagccgaatttacagatgcaggtgctatagaggaggtcaattacaaagactagggtggaaaattcgtattataggaagcgacaaagtcgaggtcgtctcgaggcgtaggtaacgaggataggaggataggaggtgcaaggataccggagaggagggaaggcgaagcatcttataggcgctcaaatggaccgggcgaaaaggaaggggacttgaattcagctaaaagggaaccattctcggcgtcattttagtggccagtagaaacgagtgtaaaagccgtctaagtcgagcgtcaacatcaggaccggaggatgactaaaattactgggcgggtgcataatagtggtgttatagggcagcggtcaaggggcggctagacgtcccaaagttacgggtgaaaaggcagccgtttctggcctcaaaagcggtcattttcggcgtcaatcccacaggtcctcatattctagttgtaaatataggctcttcgccctgttctggccacccgagtccctgggctttgcctttacatgaatactgcaatcgtctaggcgaatcatagaagaagcaactgcctgacacacggcatgcaggccacaaaataccatcgtcttctggaagcaaggcatggaatgataagaaagtatacatcgtataacctggagtactagagatagaacatgattaccaaactgtctttatttcgactccccggtactggtatgattctctgccatctctaatctatctcagcttgctgcttagcaaccttggagaaccctgtgattgtgtgttgagttgaattgaaacttatcgcttacccaaccccctgaaaataaacaacgcaatcacaaaggagatgcaaatcatgccaaaattcattcattggaccgcggtccttgcatactttgtgattccagtctgaacagctgttgcaatagcccaaagctcgacccaggctatttgctgtcttcaatagcccagcaccaagcgcctgctcctctggggccagtgcctcagctactagtaggcttatctctggccggataatcccaacgcttgagcatgtgagtattcgtagtctggaagaatggcccctagttgtctggtgattattagctagacctagatagatagatgccacttgtggaatatatgagtacatagccagtgaaatgttttacgaggcacttgcacttggtacttgtataccatccacgagatgcggtatgactggtccgactgactcaggcgattcggcctcaagagccacaaaagtatcgatgtgaagtaattgtgaatagggaaaatggtggcctccttcttttgctatcacgtcaagtgaactagccaatcacaccatcggacaacgaatgccattgagcttctgggcagccactggggcactgcctcctatcctcaccattcaagatgacaattcaaccgactatgaacgccccgagccatgatatccaactgcgtggcctaagtgataatagtgtggcggtcgatgacagcaaagcgagtggcatggaaggcggggaaggcaatgatacaagcctacacgaagagaatcctacggattctgaaatcactaaagaatatcccactggcctgaagttctggctcattattctcaccatggccgccttgattatcctaggtgggcttgacaccaatattgttgctaccgctgtgcccaggtgcgaagttgaaaggcgaaggttccaatattccataagctaatcgcattttgatttctagtattaccgatgagttccacacaatggctgacgttggctggtactcatcgggatttagactcttacaagtatgaggtttagacagaaaatagtcaaactcgatttgctgagcaacctgctcttcattccagcgctgaccagccttttcattgcattttcttcagactactcagatacgcgaaacattgcctcggcgatggaggctcattccccatagtatcagaaccatcaaacgacgcttccacgactggagaatactccacaacccactcaccatttttgaacacttgtcttagaaatactgtgctatcataggttgatatgaaaccatacctcagttgaagatccaacatatatccgatgagttgcgcaaataatttggctttgcgctgggctgtcgggtactttttgaacttgtgctcattcacccagggggatttcaactcccacatagcctggatctggtcaatgtcgactgggtcggttgaaataagtgccacatcgggcgtgagggtatatccggaatagacactagcaatattggctgatttggaatctccaaatttcactgcgatgttttgagcattcaacactgatccaacaacctgacccacagattgctggaatcgcccttgaagcccgtgctcatcgccaatggcaacaaattccgcatcaacccgtctactctggaggctccatcctagcaagctcggggaccagtcttggttattctcaaattgcttcacatcttggaagaagtctggccagttgtgtaaggtcccgaggaatcttccctcatgcaatgcgcttgacgtggtgtgataagggccaatatccagcggtggcaggggctttcgtagaagggtacggcctgttatcattgccggcattttgaattgagctaatcaatcattcgttagtacggaccatacacctggaatgtagagtctagagtctatattatagacgataacatactggaaagtgtatagtgcaggaaaaaaagaaagaagagtggtgataatgtgtgggtgaaacacagtggagtgggcagaggatgttgtctgtaacaatgagggacttgttgttgttgatgtcgagagctgactgtggatatataagcttgtaagtcgttcgatggagacattcagaggagatttggaacgcgacagagaacacctttgaagtcgtttttggtttggaaaacacctatcaagggcccgatgacgaacggagattatcaaatgagtacagagtgcaactgtgagacgtgaagacagtacacgacgtagaagatgaacgagatgaaaaggtaaacaaaaggtacaaaagctaaataggcaggcaccgacttccagcgctcagcctcgacagcggccattgttgaatagcctctctgtcgagcccacaatggcagaattgccgccaaaagcagtggccaagctacacagatcatgaatggtgcattcaatgtgaaattcaaaagtattagactcaacagtaccccctattctagagcacagtaatgacattttcgaaatcagagttatggtccacaatccactagaaacagccaacaaaaaagctcatatgcatggcacaaaaatatcgatacttgtttaagcgcaccacctcggaacacaggctccgtcttcattgatcccagtatactctcaacaagcttcctatactatagctttgcatctctccttggcctcaccaatccaagcgccgacatttgacgcctatccattaaagcggccttttaccgaagagtactgttggatttcacacactctgtaacttaacttcttcaacaattcaatccatatctcacattgcaccatgcactttgacgtccaccaagtagacctctcctaacaagtacttcgggtctatatccaatgctatctagaaagcattgaagagtactaacagagagagagaagccacgtgactctcagtcactaacctgttcccattctcaaacatgagtttgttacaaatgcccaccttacgggaatagctcaagtagttcatgcagggctcagtgaggatttgatttaatcagagagtcggagttggactggtcaagcgattcttcataattagaactagcaaaatgtatccccattccttactttgtcatgagaccttcgtctaccatctccagcccttttcatcgtgataggtatcaatggaagtgatactaaggtaccattcatctgacttgctgtccgatacaaggtcaaactgcacaaagaggtagtcatcccattttgcataaccgtcttgaggccatcagggatggccattttggagaaagaaaaaagaattgtattgtttcctcaaagagaagaaaagagaagaaaagagaaaaaagagggaaataccagtaaggacatgattagaatagttgctcgggagatagttttcaacccaagtttataaggaaagagcatatcccactcactggcttggtacttactcgaaagtggcaaccgcggcagacctcgtagacgcataatcaggaatctcaaccctaaccctgacctctcccacttcaccttgaaacaagaacccaatatccctcgttgaatcaaccagctccacctccctccgcacaaaccggctcttatcaagaccattgtccgtcttctcaagctcagagccaatatcaggccgaagctcatcctcactatcctcattccattcaacgacggcctcatcgccaacttgtttctctacaggatcccactcgtccgtctcccagaccagccgaaacccaaacgccggtagcccgaagagccgcgacacaagcgccttgacctggtacgtatcaaacgagccaggaatctccttgacttgactcttggattcgtcgtttccagttggcagacggaacgccatcttgactagtcgcgctgccacagaccgcggatggatgactctcgcgcctgaagaatccgacaaaaccgctcttgtgatagtcggctcgacgtatagctcgcacagctcactgtaccgtgggtgtgtagcgagaatggcgggttcttcttcctcggtcgtggcggagagttctttgccgatgagggataggtagtacatctctgcattggagcggtcttggggagagatggtgctgtagttcagggtggtgagggagggtgggaaccgagatagggttagcataaaagcttcgtcgacggtcattggtttggaggcttctgtgacagatggtgggaggggtggttggtcgaagaggggattggcagtgattcggagggtggttagacctgggaagacagtagggagtttgttgaggacggtccaagaggtgatgttattgcgggatagatcgagagagcggagagtcggcgggaattggaagtctagggttgtatctgtggtgttttggttgacggtgctgataccgtttccacggagggagaggtgctccaattttggaagtgcagcgagatgtcgaagagctgatattgaggtgatctcattgtgctcgagggttaatgttgtgatagtgctagggagtggacacgttatctcagagagctggttcgcagatgccgtgagagacgtcaagccagggaatcgatatgcaatggcagtaatctatgtccgaagtcagctttactcaatagtatctgtggtggacagggcacatacttcatcccagctaagcagggtttgttctagatgtagctcagtaatccccttgaaggtcaggtcttcctccaacgcttgaaatcggtttccgctattctccaatcagatctactattaagaatttggccagatttgagacttacttcaaccgcagccgtttcaggtgcttaagctgatcgcagatatcccaaacatcgcgccaccgactcaataagcttcgactgagatcaagttcggtgatcctaggacaggtttctccaatcttttgtgctgcctcaatatgtgagacttgggcttgattgtaggatgcaaggactccaacaacccgtaggccatcaagcaagacaatacgcaactcttggagctcagcgagctgtttccgaattttgtcgaagccaacttcttcaacaaccttgccgctaatctcaattgccttgccttgaattgctgctccactagccaaggcattgtgggaaaggccatgctcgggctccgaagcatacttctctcgtagcgcttctagaaagctcagaggctggtctgaaggcctggaggggcgaacaaaagaccccgccgtgggatgtttacttttgcctggaatcacgttagcaataatgcaatacaaaagtgagatattcatacatgagaagtacctgacgcctttatgctctcctgaatgcttgcctcgacttgcgtcgtcccattcaacacctaaccagtcgccggtggtcccttgaacagtacccacatagcgaatagtacttaagtgaccatcaaatgaacgacgttgacctacaagtgagacagtcatagctcagggcagacctaacagttcatttgttcatgttttggtgagcgctacttcgtactgtgatccatgcccaaatagccagcttatgtaatcaacagcatttcacatggccagaccaggctcaacttggattgatagttgaagatcaggcgcatttcatgtaatactagataatacactgcatgtatagtaggtcaagcctagatgcagctagcaaactctttttgtaagctttttaacaagaaaaagccgataaagagtcatattgtagcatgtagaagaaggcggtgtctctatcaagaaggcggtatataaaaagaatttccggtagaaaggtgggtcgctgtagttaccgcccgcgcaaaacacctagagatagtgagcttcacccactttcttttctgcaacctaccgcatcaagatggattaccaggtacgtacacgctgacttagcccgcgcggcttcatctctttcatcaagaaagagcttatcgctgacacatcccgcagaacagggctggttccaagttcggcggcggcggcgtcgcctcccaatctgccaccaacgccgaccgacgtgagcgacttcgcagaatcgccatggaaactatggatatcgagaaagatccctacatcttcaagaacaacgtgggcaccttcgaatgccgtctctgcctgacagtccaccagaacgacggctcctacctcgcccacacccagggccgcaagcatcaaacaaacctcgaacgacgcgccgcgcgtgaggaccgggaaggcaagaaggatcaatccaccttgcctggtgtcgccggtgtccaggtcaagaagcagctgatcaagatcggccgacctggttacaagatcaccaagatccgcgacccattgactcgccagaacggaatgttgttccagctgcagttccaagagatcactccgggcgtcaaaccccgtgtgcgcttcatgtcggcctttgagcagcaggtcgaaactcccgacaagaactaccagtacctggtggttgccgccgaaccctaccagaacagtgcgttcaagatccaggcgaaggagatcgatcgccgcgacgagaactactggacttggttcgacgaggacagcaaggagttctggatccagatcctgttcaagactgagcgtgaggagatcttcagcggtgttcctggtctcgcgccctcccagacctgaaattgtttttttttttcgatatcctctttgcgcgtttttttatctttatctttatctttaaccatgcgcgtcaatcaatcaatcaatcgatgaaagttcaattaacctgttgcagtctaactagttgcgtatgactatgtaggcgcttctccaatcgaagcaagaattcgaagctaaacgccgagccggtatctcccccatagatgccgatttcttatagcgcatagaacctataaagccccatgctgtagtgggggattccagtataggatgactaagcggccatatgaatgactcctagcaacgcagacaccttcagccaccttctcttcttagtagtcaccccatggtgttctcctctctagcaccctaatactcccagtgacgactctactctcacacctgtttcgcaggaaagactctcggtgcccctgctgtcccattgcagtgtcccctcttctcgctttctctttactctctcctgccccagtcctgactggtagtattgttatcttggcccgttgattggcctattcgtcgactcttgctgagtttctcgtttcacagctttatctatcgtcactggctggtaccaatcgtcttccacgcctaattctatagccgcgaggcctattggttcctcgtcgtcgtcctcctcgatatccacttgttggaactgctggaggagacctgtttggcgcatgattttgaccacgtagcgggtggtctgcgggtttgatatgatcttgttatcgtccatttccttgataacaactgcccatagctgctccctcagctttatacgcgggatgatatatcctgggcattgtataaggatatgcttcggtgtttgtgaaccctcatcacagccgcaccggtctgtctctactgccttgatgttgaataagaagtgccgaagcccgattctcattgtacgcatttggattagaattgttattcttaaccatgcgcgtgttggccttccagcttagagttatgacaccaatcaatggaactatcaaattatgaaatatcctacgatgaacatagtcccctcctaatttctgtgttgatattcgcctaacatacttgatgtggtcttttttgtctctttagatatccatacctgctgctggagctcgatccctccattctctactacccctatgccctccaccccatatctaatgccgggacagtccctatgccctccaccccatatctaatgccgggacagtccctatcaccgtaccaaatatgattgagaagaggataagactatcagggatggccatgatgtgaaaaaaaagaaagatttgtgattgatgtttattcaacgtgaagaaaagaaaatatttatggtaaattcgatgttgacgatggccctcctacctcgccaacacgccttcatggtcctcgcgcggcgcgtcgctccagattcgtctggtgctttcgaccctgggtgtccaggtccaaaagcaactcatcaagactggctgacccggatacaaaatcaccaaaacccgcgacgaattagcccgtggaggcgttgacggaagagttcaagctagcttagatgaatggtaaatcttcgtccttttgtggctgttgcgcgtactgccagttcgttcggcatggcaataagcccacttgctttgagaacgcgtccaatacatgcagaacgatgatgatgctaattgtaatggtgtatgtgagaagaagagaagagaggaagatagaagagccaatacatagtctgcgtagtttccatgattggagggagtagttgctcagggggatggtcaagacatctgaagagacatgtaaagagatcgggactaggggtttctgtcgacttcacatatgtatatactatccttaccttatgcttattatatagttatatagcactgacgatgaactcacccttctccgcagggtcagtgactagtcattgtcaagtaaagctaagatgagcttaaatgtaactatactacatacttatctttagtctaaacattataccgctactatcttttaagctaagttatatgtgaagcaaagcggaaaacgcagtactacttgtcccctttccatgatagaggattaaaagtcggatcaacaccaaatcgtggttgtaggtatgcggtatgccacccacggtcagactagctcgggggatctagtcttaggacaggtagcttaattgaatatgtttgatgtttgctagtttacagaagtggccagctatataaagcaggccatcgtctgtgatctggaacgactgatggatggatatgatcgacccggttcgccgactcgcaggcttctgaaaccagtcatagcattgggcaacaaagtcattgtatacggctgaggcactaacgtccaatgtagtcttctctgttttagagactcaaaacgcattcgactgtgaaccggccaagtatatgaaaaaatagtgcattgcaagaagggcagacatagtcagaaaagacgagtgcattttatttttagggtaatatcctgactatcctaaatcagctgggtctatccgaagatgtgacaagtagtgtcgtcttgaaagggatgcaaggcgttagatacatatgtatcaacaagtgaaaccgaagatgggtcataattcgggaaaacaacatcgcgctgatatgctcaatgagaatgagtaacgaggtgaaaacaaagccgagtttttttctgaccgacaaaagagtaccattgagaaacaaaggatgcaagccctgcatgcttcccttgtccccgggaatcgtttcgatcagtctcggaacacaacaaacaataaacctaagtggtttcgaaggcattgaatgccttataggtgtagccgatgaatggcaaactcatctcggcttcctgtgagtccggcatggcacgggcctgggcgcggtggatcgcgctagtgtcctcctgaggaatctcatcaatcgggaagtacgacacatcaatgttcgagctgagacgcggctcgaagggagcacggatgctgcgcagttgatcccaaacaacacccctgaagaaggggtggcttttgatctgtgtcgcgcctccgtgctgaccaccttcgctgccaatacggtgatccgggtcacacaagaaactagacaattcagttagcggatgatcctgttgaatttggatgcatagataaaagcccaccttcggatcagcgcctcggagtcacggccaagaaccagttcatccgggaagtacaagcactctctccagttcacgattttccggtaagtgtcatttgtgtcttcagcacagaacggaggccagcccacgagacattcaaacatgatggcaccaacagaccaccaatcgcagagataagtgtagccttgaccgttgaaaatctcaggagcaatataatcaggagttccgacagtcgaataggccatggcacgacgtgactttcgccaggtattgatctgaccacggttggacactgtcaggttgatggcatcattgaagtatccagagttgcggttccgatccttggaggtagagttcttgaggaggttttggtagtaagcgttgtcatgagtcttcttgcctccggttgacagaccgaagtcagtaagcttgacgtgtccaccgcgatcaagcaagatgttgtcaggtttgatatcactgccaaagaaacattcattagtatggattgtcttgtatgttggcgtgtgcacttgattcttcatcggagagagagagagaaaaatgcatattgccaatgtccaactcgcgaccaaaaggcacttaccgatggaggaaaccaagcttgtgtacggcttcaattgccatcacgacctcggccatgtagaaccgtgtaatgtcctcagagaagatctcgtacttgatcaacatggtcatcaaatcaccaccaggcaaaaactccatcagtaggtaaaggtacgcagcatcctggaacgatgcgtgaagcttcacaagccaagggttgtcctttgaatcagccagaatatcacgctcggcacggacgtgggctaattgatccttcttgaacatttcggtcttgatcaacgacttgagggcgtaaatcttgccatcagtcttgcgctgcaccagcttgacctcaccgaaagcaccctttccgataatcttgatggtctggaagtttgccggtgtctcctttgtgcgcaggaaccgaaggaaatcggactctcgcttggaaatcacgtcggcatcctgtcgcttcttttcgatggggatattggggtcacggagggttttatcgagttccgccgatctataggggcgaacatcatagataagtcacaactcggaaacaatatttcaaggattccattggggacatggatacttaccgcatgttacggtcacgggcccgttcaatattctcgtggaagaacacagtcaccaactcctttgctgccttgcctcgcttgtgggcgttctcggagtaccgatcggggaagcgctgcaactcttcgctctcggggggtgggcgagggctgcgaggcaccggggggatcaggtgtgatgcttgggcctgtgtttgagccggggagccaccagcggtgcggggccgctgggctggggaaccagcccgattattgaaaaaccctgcacggtttgagttaagatcctgattagagaattgctggatcagaccgttggtgccgtcagggtagcccgggcgcgcttggtaggcgggctggggagattgcaacgcttgctgttgcgcgtactgctgttgctgttgctgctgttgctgggcatactgcggctgtacctgttggggtgggtaattgttgggcaggaaataacccggggcgtaagcgggattggaggggtcgacgtattcctgggccccctgagtctgatagatgggctgggggaaggcggagggggtagtgggataggcgcggttgttggcattgtagttacggtcatagccgtaattcatattgttgcggttgttattgttgggatccatcttgactcgaactcccaagggacttttcaagggtgatgggggagaagaaagttgagaggaagggagttgaggacgagggcggggagtttaaagaagcggtggctcaggtgctcaggaggcaatctagccccagcgtaactggttgacttgttgtttacatgttacatctttctaccacacgattacctgaaacagctgtgttcgaaatgtctttgatacttttcttttcatctaatgatttaccagaagcaagcgaaatagtctgagggagggaattaccagtgtgccaataagctgatatcgatgttttgaaagaggacaatatgttttacatgcatactttgcacgtagcacctatgttgtagtaaacaacggctctccgggagaatccctggaatatcccgaggtcactggcatccagggcgttgtgtatattgtacagcttttttcgcaacttcttggttttctctttccaatttgggaactcagctcttgccgcttttggaggagcccctggatgtattacataagtacaccacgtgatctcggcctaaaataacttctgctccgcatacgaaccaaacctcagaaagaaacggatcctgaccattcttttcactgcataacgagaacttacctattaactacgggaaatagaactacggaaaagagtgtcttctattatttcaacaaagcatatagccgacagaacctatatctcaaggacaccatcgaatcggacgtccttataccgtgctatatactaaacccattcggtggtgtccttgagattctatgcttcgttgactttatagaagttacctgcaagcatacttgataggtaagctctcgttgtggggtcaagggaatggtcaggatccgtttctgatacctcggatcgcagccaagcctatcccccatctcgagatcttggctacgtaggccgttataggttcaggggatcatcagaatcttgcgcgtagtcgatcctagtatgatatctctggacggctggccggtacccacgtccattagctgttatggacgtagcgtggtcatttcatctcgatatcacgtgaagttttgttctacatcccaggaggtaaaggaactaactacagaaaagcaaaattccgagtgacagacattaatcggtcaatatgtacacaagacagatggaatcatatcattataatcccacatgttcggggcggaagaaaaggccaaaacgccgtagtgctttgcgcgctcactgcccagtcccctaaacccccaatagaaacaaaaagaaagaaatggtgaacaggcagagaattgagatcgtatcatcggaacagaagaaaacataacgcctgaccatgatgcttttgttttgtcgaccgcaaaagaacaagatgaaaaccccgtgaggacgcaggatcgagaggatggtgtaatggtccttggttaggaactcattatgcaaggagtaatgaaagagtatgaggggcaatggagacgctcgaaagcggtgttagtcacaatggagtggattacccgcgagcaacccaccatgaacggactgccatgcagcaaatccgcttgtagacttgtgttgtgcccttgccctcggcttcttcttcgaggaacttctgtgcgacgaagagcctggttcctgcctctttctcggtggtgtagcccaccttgggcaggctgttggggaagtcagcccagcgctgtcctaggtgacgtgcgacagagatggagtagatgatgtcccgattttcgtatgtgtctagcaattgtcgacaccgactgagggtgtcgtcgatctgtttggccgagcttgcttcgttgtcataaagtgtgaggaattccccgacttggtcccagaaatccaattggcggctctggaactgatccggagagttcggggggttggcggcatccatgaccagctcccgcgacaatgggtttgagtccaggtggttccaagtaagcaatgcttcaaccacgtttaaccgtgcgcaagacacacagagattccagtcccgcccctgttgtccagtctctccgtccggtaccttgcgacacaacgacatgcttttccagataatcgaagcctcgaaactctctagacgagcaagggtttcaccgtcttgaagatcccattcgttgaacgcgatgatcaaagccgaataatccgccataagctgggcatcggccatgagtaatgagagagcattttcggaataccagcgaacctcaagaagcttgtcgatcgcaggtgcatatgtggccaggaaaactgcttggatctcttcgaggcggcctggtggaagagttgcgacagggtgagggggaggaggagcaattcccctcaaagagaataggtcattgacatagagatttttggctgtggagtggattgttagctacccgtgcataatgctgcaatatgcagatgaagaaacaaattatatgaactcacctttatatgaaggctctgagccctgttgccgtggtacgccagtgttctgcatttctgtatgattggattgatggttcgttgccaaagaagaatcgatggaagctctgtgctcgtgttggtcggtagaggcagtgggcgattcggattgaagggaaggagcaaatggttgagacgaagcgggcatgtacccgggaggagcagaaggatatgaagggtatgaaggtgctgatgaattagaatgtccttgaggattgacaatcagcgaaggaggagggttaggagctggttgaatagctgaaggtgtagatgcttgagtccgaaacacaggatcgtagcccaaacattcacgtttgcttttcacacaatttctgcagaccggatgtgcttcgtcacactaaaatcgagttagacgtgaaaatggccaaatatccaaaaagccgataaaaaaaaaagaagttggagattgagagggaggtggatttaaggcaaaataaatggcggggtctggcgggcacaagcgagcgactccgccccgcgaaaactacatttgcgctcaccttgattcttcgtttgcgacaggttaaacaaccggtttttgtgcgtcgcttgacttctttcttgtgtctattgcctgataacatcttgttcgggtcccccgggagttgatatcgcatttgcgcattccccatattggagggatagcccgtcatgtattgtcccatggaagccatcggaggcatattgtttgggagcggcgatccaatcggtgcctgtggcacctgtccttgggatccggaattgtgatacatgtcgttttgataatgttgcggctgtgtctgaaactggtgggtatgcgcctgtggtgattgatggcttcctggttgttgggattgagcgggactatgcgaatattggtatgaaccgttggttgaatgaaagtgagatgtcccattcacagccccattgtcgtgcccacccgtagagtccgccatgcccgcgttcgaatcatgatggtccaaatgactactgtcgccgaaatcatggccatccattgttgggatatcatcagttccaatcgctggtaaggaatggtcgagggaaatcgcaggaagtgacatgtcgggaggtgcagatgaacctattgaaggcaaggcatcaaaggactgcaattccgaatcatcgaagccatttgatgtgtccatgggtggaagtgatggatcaatcgctggaagtgatgattccacagacggtaaagtcacatctggaccttgtgcttgctgggtagcttctggtggctgatacgtgctggcatcctgtggtgggcctgcggcggacgaatttggtgctgctggcacttctggtgttgctgatacttctggtatttgtggtacttccggtggcagcacctctggcactgctgattcaactggtggttctggtggctctgacggtgttggttgggctgattgagctggttcagctggttgagttggcgccaccggttcttgacttgtttccacaatgggttgattcgtttccgctggtaaaggctcattctgggataagggttgttctgtctcaacagctggcgcattcggttcggtcgcaggattggtggattcgccaggcggggcgctcgagtccgtcggctccgccatactggaattcacagcctcccaatgaaagtctcgatcggaggggagaattggtagatattttgcaagtaggcttcggagacaaggtcttgagtaaaggagtagtcgagtaggcaaggtcaaaggtcgtctggtttgtggctgagcgaagaaatcacaccaggtcgaacggatggggagttagaaatcatttattccctatgatctgtggggtccagcatttgttagtcaaaatattcggccagcattatcgtcagtgtcccgtatcggagagtgatagagtcctcgatgtcgatcatcaacatcgccaggaaagaagcactatgctagcgcaggccctccatttccacgtctttaaatccaatcggcggatgaaccatgtgcaggatatgtactgagcgcaaggactgtgcatttgtacgaatgtccatatgatatagagacctcatggcgtgtccagatatcctgctagtcaatcgaggttttgtaggtcgcattcgcggtggccgaccagcctcaaatgtaaccatctgtcaacaactcccacggggtctcggaaaagcatcgcgaggtagaatctagcactcaatgacctcatttgacagcaggaatactggacatcgtatcgcacggggtgaggctccggcgcgagacggtgcgcattggtcgagggattggcagggcctgcggggatcgcgacttgctcgaatttcaaagacttaccaggtagatagatttttaagataagatcgacagaagcacaaatcgcggggagactatgcagatgcgagggtcgcgggtcaagaaaagcgcgaaagagagaggctaaaggagctttcctttccggcgttgaaactctccgctttgattgtgaaggaaaaaaaattatagtggcaaacaccgctttctaccccaacattgcatattccgaagtttgatatctgtgttttcacattatttacgttatttacacttgttttatttgttttgtgaatgctttgctgatactgttgtcttatttggacttcgattaacatagggtcgaattaatagtgtcgcatacagcccttctagtctagatccatggaccatccatgaaagctatagattgtcctgggaagaggcgctggcataagtcagcctctacatggtcaaaggtccgcttcaaacgtgcacgtgtgccaatgaataggacgcgtttgaagataggcattcaacacagaagccttaagcttgcaaatgatcctatgggtgaatgggttcgaagtgtacattctggggagcaatattctgccacgagtcttttgctgaagaatgtggtacatctctgatattgcttggcgcagtggaagtcgtgcattgtgtgcctgttgcttgaagccacatagttgcagacttggagactcgtggggtcatgggccaatggatagaagtcggatgtagaaagacccgaggggttaggattctcaagggtatgggcttgcatttaaatttgagccacgacaaataagttttgcggatatcacatcctctgaaggtggcactatttcctcattgccttcggcttgcgcttcttgaagacgacaccaggcgtagcatcttcactctgcggcttctcttcaaaaactggctctactgaagattgagcgggctcttcagtcttgatctcacttgactcattcgtctcttgcgcctctggcttgaaagaatcatcttctgtctttgcagtgagggtaggttgttcagtagctgtctcttgctcatcaagctcgactttcggaatgaaggttttcgtcctcttaatatcttttgtggatgcaatcaagtcatccaagccctcgtcctcttgtgcaccagggtattgcctcatcctcgagccccaacctttgttgataataggttcaggcgcgtgctcatcctcctcctcatcgccttcaagtttgcgcttgcgtattccaactgactttgtggggccttctaatccttgctggacctcgatccttgtctcagatgtcgtctgccaatcccctgctaaggccatatcagcgcggaattcctcggggacggcgacacccattgccacgagctgtgccatctgtttctttcgttcttctagggaagcaggtcgggctgtggatttaggggctggcggtgggtttcctttcgcgctgtctttgtcggtggaggacccgccactgacagcctgtcgcaatcgttcgacttcggttttcgcgcgttgtgaatctctttgtttttgttcattgtcattgtgtatttgtctaaggaagcgcttgagattgccttgatgttttgggctggcttcgtgttgggtcttttcgaagggcgtgtcacggatgaagaccttgcactgtttgcaccagtagcgcggctgtgaaatagtcagcagggttctagacaggtaaatttcacacttactgctgatttccagaattcagacatgccggagtactgagttggaataagaggaggtgaattatcgagactttgatcgcattgatattgcccggcagaaagctacgtagttaccccactccgttggccaattaaccggaacttcccttcaccacctaggaacatagctctataccgagtactccgtatatatttgtactatttggactacctccacttctatgggactaagcagatcttagcaaaggatgctcaggtcagtgacatgtgcatattactaagttgtccctaagaactcgggaaattgtcatattaagtcttataagagctatcaatcttccgaaccaagaatttccagttcggtaactaattacaaaatcggcagtcctgctcgagattatagtatatctgcaaagcagaaaggttctgtatagtagagagaaagaaggacgaccaaacaggcaaagaggacgacgacgtattatcgggtttataagtaaacagcaaagagagagagagagagagattgatagaagggttcatttctgaaaacacattttcatgacaatttgggatcatgctagatcaaagcataggtttatgggtgctgtggcaaggtgcaggcgtgattcaatccagttccgctgtcgagacgcccaaagcccaaggtccatcatcatagatcgtagaacgacgaacatccctcgcagtcatcgtcgcggtatatgggttggcacgatgcatcgattggctatgaaaatcagtaaagaataatataagacgggtgagacttaccgattatcccaccagaccatatcacccccagacaaccactccatgctgaagacatactgctctagttagccctggattttaacagaatacggctgacttaaactcacttttgattgtgtacagtgtttaatcaactcccaaatcagcctttggctctcttcaatatcctttccaacgatccgtttggcatgcgccgccagatacaatgttttccgcccgtctggtgctgtttgtacgagacggtggtaggccggtggtttggctgccagttcgtggggaaggggatttccaaacacagttggtgccgcgagctttcgggaatgccagagacttaatgaagttagcttcagacacggggagatttcgaaacagctggcttactcgtgctcgacaacgaggttctcaatctcgtcctttttcgcttgagatagatcaccgtacgcacgacgtgtgtctgcaaaatgggtccatgatccgcctgcgactgggtttccatgagaaagcagtatggaatacttggaccgatgttggtgatatgtggagtcctagattgggttagtacccatgtggctttttggggacgatgatgattacagtgtgccatagcgcattgcccagactgtggtagtacctgcgactatccatcttcaccagagagccatcctgctcgatgctattctcatcagaatgtgatatatatttaagtttgcatgtggaatactcacttggcaacgtcgaagagtaacggttcacctaatcggtcattttcacgtccgtaaaagaacggattgatttctagtttgtcacccaattgttgcgagaaagcaatgtgccgaatattgtctagctccgtctttcgaaagatcagtactgcatacttgtcttgcaaagcgatcaactagcatcttgtcagtggtttcttccaacctctcaaatattaactcacttgcgcgacgacgtcatctgatacaggtttgctccagtcaacgccgtatacttcggcaccaaagaatgaatcttccgagtggagtattgggtggatagacaatgtgccttcttggatcgtttcttgagcacctgtccgagaaggacatgtgttatcgtacaccaagatgtgcatatcgtccaccaagctatgcatatcgtcagacattgaattgcgaagtgagttgtgtgatctcttgatttgagaggcactcctcgtttttgatatctccagataaacccgcacgcggcttcaagcccgcgcggcccgaccccgaagatgccgatgcaagagctacggccactcaaataggatagcatttcctacctgtgagaaaagctaataattttacttcttctcatatcaccataatgacctccatcctaataaaagccggtccataccggttccgtgcgaggttcgaatcgtcagctcccaaaacagtggccctcttccgcactctcctcccataccgccagaaactcatccatgttcgttggagcggggagggtatgtggatcccattaggagaaactgatttcggactaccgtttgagaaccatacggctcacccttctgcgggtcaaattctgttgtatcctggtggtatctccgaaaccgagattctgttctgttatggaggtgttgcctttgcaagtaagatgggaccgctggcggcaaatcatttcttgactatcgttgagggaattgaaaacctaaaggcactgggtgagctggtgctttgggagggagcgcaagatattttgttcgagttggatgatgctgataggtaagtctgttctattgtatagactacgacctcctctcaatactaattatgtatccaaattctcgtataggccttgttctgcaaagctatgatattctactatcagtcatgaaagcatcccgtccatattcaactctgggaaatcaagcgactccccgaaaagattccctgcccagtcaacaccagaatcattcatcaaatctagcagagactggattgccatatcatcaatctccgtttcctcgatatgctgctcgttcttctcagagattaacaccaaagcaactgtatagtgaacaatggcttggaagtcgtgcgcaaaatggaatctcgtggccagagacacgctgtcgaagatgtctatcgcaaggaggaggagtcgagcgagaaccgaagaagaagaggagggaaggcgtgtacataatttccctttctcttgactagagtcttcgctgcaaatttgtaggttttctgtttctcatgttgtcagttattgatggactcagatcataaaatatctatatgaatacctcaccatcgatgatgccccgaatatagcaaagacataagaatatgatagcgaacgtatgcgaaatccaggtcgagtccaccgcatagtataatcgactcacggatgcacgatccacattgtatgtcccaccgggaaaggtagatagttcctgcgaatccagcgagaagacaatatctggcttgaagctcgattgtgctaatattatctgcgctgctgcggtcaagctcactgaaagcgcttgttgaacatgtggtttacttaaatccgtcgatcgatgtacccgtggggaagaaagtagtggtgcaagggatgcacaattgagggagagtcggtaccactacatcgcaggttagattaagttcctgaataaatgtagttaggtaactgcatacccgggccgaagtgaatggcaaatgattgtaatgggattctgatttctctgatgattgttaattactgtgaggataggatgccaaatgaacgcacctaaacgagaaaaccaagatctgcgaaccgtcagtaagaccaaaaataactccaggaagattcacttgcctctcccaatcatctaaatcactattcaaccgttgcaagcaactcggttgcaatcgacggccagatatatccccagaactagacatagcaaggtgaactattccgacaagttccacaagtccccttacccgaaggtccgcaggggactgcatcagctcatgagagacaaacctccacgccacctgaaccgatggagtaggatcaattgatgcgggtagaccggatgtaagcatgaggttgaagttgcatgtgagcaagttgtaccacactcgtagctttttcacatcctctatggatggtaccttgtcagggggtttgaatagtgatgtggctgattgttcgaggcccagtagggcagagtatcgctctgctaatcccaagacaacccaagcactgatttcgttgtaccggcttttggtctggggttcgtcataggtacttgggcgcaaggaatcctcatcttcaccctctttgctgcatggcatccactgggcatagagaagaagcacacagatagaatctaaattgacatctgatggggtaggccggagtaggagcctggagaccgctttgtcgagtaattttgtcagatcataaaatcggggatgaccgacaatagaatcgtcactgcacacgagtattattagcctagcttttgggtctagaaattttcgctcacgttcgatcacctatatcccagaaccgggtaccaactgagcatattgtcaaaataagtgttgggcttgtttgaagatattcatgccatgtatcccgaataccttcatctaatacaggcgctgagtgatggcaatgatcaaagaatctgctgaatatcagtaggtggcatatttcccagatggagttgtagaatacatttcaactgctcgccggacctcttcggctgtaaggagcccctggtaaataggatcgtacatgttcttgtatctctgcgctctcagagttgactcatcaactctctcttccgcaagcactcttaacgatcgcagtgttgcgataggaggacctagatggattccgtcgatttctgactcgggagaatcatatatgttgctttgacttttcgggagagcttcttgatgctcaggctgaatgtctctgggtctttcttttgtattgtggtcaaatggactcttctgattttcaagctcagatattcgggtttcatgttggttgagtctgcttctggtcttagtgtctgctcttgactgggtcgcaattttcagtctcacctattttgaagttcaataaccagttgtactagacccgatggactttgagtcaggtccaatgttggtgctctatctgtctcaaatgaacaagtgatgcttagtctttgacatcgcttgcatggtaattgtagattggatacgtcggatggtaaacatcgctgttttcgtgtgtgacactaaagcgcctatattaagtactgcgtttctatgttgaacacgcaatactcacttgtagacaagcccgggcaatccgacgcactttagcagggcgctcattatctgtttgattgtctgaccaattggcattgaaggacattgctgtttggtgtttgaacaagaagaagacacatcttagagaatcagatcagaaaaagggccaatctggggatatttactctgataacatctcggacgctgatttgctgccgataccctcagtgttgaggctttcatgaaagtcttatttatgggcctcgcggcttatttgacactttaaccttaacagaagtgcctgtattcgagttaattgtgtattccgctgggattcgcagagtacgtactcagcatatataatctcagctcctgccaactcatcctctgtgaatgcattggcaagagattgggtttttccatctttgaccccgatacaacatttgctttaattcgttagcgaccgtgagtctgtcaaatcaccaaaagccccgtggctgatgtcgctggcagtcacaactgtcgcattaatcacaaccaaatcaaatttaggccatactctcaatagtgtcagttaaaatttgggtgtcgcattggcatagtaaggcacaacatgcggcacgcacggctttctagccgactccatcggcttgtgccgcttatctggccacaacgttgtttgagatataggattctatcgctatcatttgattacgaacaatatcccgataactatcgcgttgctaaatttccttatcgtcccacaagacacgttgtgctaggtttggtaggccttacggagtatagttcggagaaactcgatacagggcccactacaacttggggagagagacagagacaatacattcaaattgaaagaagcagattgacaatgtatatagcaataaaataaggttgtcctgttaaacacacagagtcgacgcgagagaattatgatttagattctgtcggaaatcttctgccacagattctgggcagtttcctaggccaacgattaattatatgaaaggtttgggttaagatgggactaaccttctcgataacctcgctcgaagagccggtgacaaagtccatctctgcataatcgaccatctttgacttggtccagaacttgtatccaaagaagaggacggcaaagaacggaattggaaagtaagtagtaacaaaagaggaagcgtcaaagctcggcactttgaaggagatcagtaagtggaagaggtgcttcatatcttgcgaactcactgaaggaaccaaacccgccgaagatgatgaccataacgcaaattgaaattccatctaaatcgtcacatatattagtatctccgcacgaaatagagaatttggaagctgacagtatgaaagatatggttgaagaggtgccatatatgggagtgtctttcgatcgatgccctgcgccttgagacctttgttccaacggatgctggtccacaagatccctgtccaggagatcataccacacatcgcagtcatgttagagactttattgatgttagcttcatagcctagcacggatttcctcaagatgtccactcacaatagccaaacactgtgcccgcttctccatgggcggcggccataaatgagaggaaagagaaagcaccacagaaaagaaagcagacccaggggaacccatctgctcgagttttgagaaagatctttggggcatgtccacgggttgctagtccgtatagggttcttgatgagacaaaaagatcagctgtaccggcagaccatgcgctggtgagaagggctgcattaataatggaggggaggaccgagatcccggagttctatatatgttagcttttcagccctgggtaagggtttgcacggtgaattacctggatagcgataacaaagggactcttggctgcagtagaagtaagattgagagaagggtcggagggagacacgagaagtccgatctgggattgtaagtagactgcaagtaatcgttgggttttgaaacttaccaagaaagcactgcagatatagactggattgaagagaagggaagttagtgaattgacgtctgggaaacaaaatagctgagctcacagagtacaagcctaatccaaacactcttgatggctcgcggcacattctttcgtggctgtaatatgatgtaagtgagaggaactcgcgatcgggttgacaaactctcacgtttgaagtctcagcagctgcaattgccgtaatctcagatccaatgaatgcgaatgcagcattgatcaaaactataaaccgatgagttattcggtacgagctgatagttcgaaactggtctcaccgctgaaaaatccgaggaagcgtcctttcgaaccggctttattgaatgttagataccagtaagtgggtattgaattgatcgacttaccaattccttcatactgtacgaatccaccagtctcgttccaatatttgaatccgattgcctcgtggttaggtccgccaccggcactaatgataataccagtaataataaggccaatgatagtcacaacctatatcaaatgtcagttctctccatttttgaggctgcgctctttttatcttaccttgattgaacaaaaccagaattccatctcaccaaagactcgtgttcccgcatagtttatggcaaactagatgatcatcagtatcatttgtagtccaattctttgcacaaaagcataccacgacgatcagcatcagcccaacccacatggcattattacagattccagtagagcatgtagaatctgtctgtccggccggagtccaaaatgtgaccagaagagccgcagcggaaatttcagccggtaagacaactggagaaatcagttagatgcatcctgctttcccagaataaacaagaatagtcgtaccaatataactaaagcatttgtcaggccaggttctcatggttcagaatacaacttcacttacttataccagaacaggatacccatagcaaatccaagctcgggcgaggtgaaccggccagccaaagcgaattgaccgccaggaatgggaaattgcgatgccatctcaccgagagcaacctgcggatggtcgtcagtctttttgggagatttgaaagcgtcggcagttgccttaccattactgagtacagcaacgaagccataatacagtatccaataagaagaccggctggaccaccatgctggagatcgctcgctgtgcctagaaagaggccagtaccctagggaatcatcagcatgaaagtgaattgagctgacagtaggacggatgactgacgataacacctccgatggcaatcatttgtctatatcgaatcgtgagtccctatatatcaagtcccgcgtgtggcacttacagatgccgtggctatactaagttttagttcatccctgttgccatcaaaaaggtgtggctcgacgtaccctgagctgtcgttggagaccatgattgctacctatgtcttgggtagttcccatgctgactgggacttcgttggcatcataagccatttctttagttttctgaaatgtaggttaatataaaaaccatggatcttactcccaaaggaggtatatctcacgtcgtgctgcatattgttccacctagctggttgtcgatgaatgaattactttcgttggaaaaggattggatgatcctatatacatatgtgattatcaacgccatctacaaaaacgccacatgaaggttaaatcaaacttatcttcgagataaggctcttacacggttcatcaccgtggcgtgcgggtcgaaccgagatttcccgcgcctgtcttatcagcgggtagagaccgatgctcccgacgctcaccctcctcaaaggtacgagggatcgtcaaagattgaatgtttgaaccaatctgaaaatctggaatttgactttgtggcgactattcaagtgattgctatctcaaaatggcatattctacacggcctctacggccgggagtatacgtgccactgcccacgttctttgatgaacaccaagaaattgactatgacagctatcggagacatctgctaggtaagatagggctcttattgaaaattaccaatgacatgaacttatctgacaccgatcacagctatggtcactcgcggcatgggtaagttgtttgagcgtgtattatgaaaccacatattaatgggactccgcgttcagtaccagtatgtgctggatcgttaggggaggctgttcacctggtgagtttggttctttcctatcatgcctttagatagtactgatggtcttaggatttcgatgagcgtgtatcccttatccgcttcatcagggaaactctggatggggcaggattgcaatctacccccatagtcgctggtgtaggaggactcagtaccagagaaactatcagtctctccaaagctgctgccgatgccggggcgtaagtgaatactgaattccggcgattatcttccttctaacaatgacagagatgcgggtatggttattttacctgcctattatgccgcgagtctgaacacagacatggaccaagtcattcaatactatgtggatatttgcgaagcatcgccagtatgggttgtccataacgcactaactgcatcattgctaatgaagtgatagattcctctgttgctatacaacttcccatccaacgctggcggccaggatatgtcttcagaagttatcagcgcgatcatgaagaaaacatctaacttatgtggagtgaagttgacgtgagtcttagccttcttggcaactctcattttgacagcgctgataagaacagatgcggtggaagcatggggaagctgatccgtcttcaagccctgatctccgaagataccacaataaatgagactcgcaaattcccatttcttttactggacggccttattgctgatctaaccccctggatgcaatgtgctggtcatggcactgtgagcggtattcctaactttgtgccagtggcttctatgaggctctggtcactactgaacttgccatccccaacagagacagaacgcaatgaagcgagaaatattcaagcgattcttgcgcgggctgatgctgctgcggttccaggtggtattcgggctatgagtgagtatatccataaagaatttcgagggtactaggctgattacatgtagaatatgcattgaacaagatgcatgggtatgggattgctccgcgaagaccattgcttccgttgggggaagctgaagggggcgagtttatgaatgctttgggtgaggcaatgcgacttgagtctgaattaagagaggcaacgtcaactccatagcatggtagtctgttatcgcgactatgttggaccaagtgtcctttcttacttcacctttcctacggtcgttgatactctttgtatatgtagccaatcaatatctatcggagtattatggagtatactaaacgttgtaattcttattcatatcatactaaaagtacgaaagaagcaggacgaaataaacaaccaggtaatacaagcaaagttcttttagtcccgggaattagcaacgtctactcactttctagctagctacactattgataataggaccaccatctatccatacatactaattttcatcagttatcaagtttcggttaattagagctttaaatccaagggtcattcttagatacaatgcactatgctatggacgatcaaaataactttgccccaaactcttcaaaagcctgtcttcaaaggtccgcctgttccggaactgggctctttagttttccaacttcaagagccatacggatgttctcaattgtccattcttctatggcaagaattgtcttttggcaagtcagtctcacaccactacttatggggaaatacaaaactcacctcactagtccaagtgcccatatggggaaccagaatcacattctggttactgagcaacccaggatgaatccgaggctcttcctcaaagacgtcgaggccagccgagaacactttaccactatctagggcatcaaccagagcagcctcgtccatgacagcgccgcgggcagtgttgaccactaccacgccgtccttcatcttagcgaactcagctttgccgataatatggcgcgtgtttttcttcaagcgattagtatcataccacatctgcttcccttttggaacaagaaatcacttacattcaatggcaggttcaagctgatcacgtcactggtggacaggagttcatcaaaagaaacatatttcgcacccgctgacatctcatcactgagtctgcggcggttatgatagatgaccttcatcccaaaggcctctgcctttttcttcaaattacgtccaataccacccattcccagaatcccaaggacctttccctggggatcatggccgagaggaggcgccgggtggccacgccatttaccctcgcgcaaggcgttcatgccggtgttgaagttgcgcaatgcaccaagaatcaggaacatgttcacgtcggcagtggcatcgtccactgcagttgggacattggaaaccagaatcggggggttgcgcgcactgcaggcatgaacgtccacttggtcatatccggctcctatagatattgcatgtcaacatatacatatttgagcactcatatcataagctcaacgtaccacaatgcgcgatatatcggagtgagcttggtagcacattcactagctcctcgtctacaagccctgtttgactcaaagaccccattgttcggtatatcgcaacaacaccatccagcttgccgtctttgcactcttggatgaactcggctcgggtggtcgccgctgactcaactagctgtgctacctctcccaatgcattccaggctgcctgtgcactgtgtttgaagaatgtcaatttcatgaaatggatatcaatggtgcgaaaggatggggtgaacgtactagtcgatacttccaagacgtaggaccttgggcttggggccagtagaacccattccgatggtattaagggcagttgattctgtgttgatccagacaattagcaatttgagcagacgaggaatgtatagcaatgctagaacattaactctgagtcaatttttcaaagattttccctccagttttacttcgggtcgaaataccccgacgccttttcttgacatatttgaacttaccgataagcaagcagtccgatcaagatgataagtgacttagttgttgcaaaagaggtttgaagacacaaatgaagtcaaaggaacaagagacagagatattagacaataagagtcataactatatatattttactaagcatcggccgagaagcaaagcaagtgccctcaactgcggaatacctaaccgacgtcagccatcggctcgattgccgatgtcgttatctgttgacacactaaaatgctggccatgagtggtgcttttattctagtccactgtgatattgtgtggaatagaaaacatttcgagaacattggagacttcgtgttttcaactttgaaatggaactcgcgacggttcgagtaaatgtattcagccagatgtgtactatacagtgcgtcaaggggctatttccaggctcactagccttcaattagaatacgagtccagtcaaacttcttccagcgctttctgaatccgtcaaccctgcgatctccacggttccagcgtccttgtcgtttgataacgtccggtgcaacatccagcattccaccgatgatctctcgggcaaagagatctccacgaggccagcggttgtcgtcctccacaatatgacccaggccaccatctagttcaaaccaaacgtggaagtagggcatctccttcacaagggttcggcggaaggcagaccggcctaacccttgctttgatttagcaagggtatcgataagtttgcggtgctgcgaccattccgactcggcactgagaattgcctctttgaaaaacgcaggagcggtttctcctagactgtagggtaaaggcacgacttccatggatgcatgtcgcttgcgctgtggctgggctgcattctcgtagaagatcacatctcgaccttggtcgtggtacatacgcgtgagactcttcataaagttgcggatctcttcccactcgtcgtcatcgcattccatcaaattagtgcgatgttggattggtacgatagtagcacccccttcactgatttcgggttcggtaggaagtgtgaggaagaccctggtcgcaagggaaaccactggggcaagaggaggcgtgcccttgtcttcgttgtgacaaagcgggcagttgtccaatatccggttcatcttgtggaagtcattgatcgttgtgttcttgaggtcaatctcagatcgatgaacccttttggccaacttggacgcattgtcatccatatactccaagtcgttctatacattggttagcaggggaaacaggagtcatcacacataagtctaggactgacctcaaacttggcatcacggccaatttgatctgctaagcggcggccttctccgccgagttggccacgggtcttgcgctcttcgcgcaccatatcttcaatggtcatatcttcatttgcttccacctggcctctttcccggcctctcttagtatcgacagctttgacctcattcctagagcctgctagcatcgggttatgcataacatcaaggaccacaacatcggactccttgcggtttgacatagctgccgcggctgtattgtactgttcctcgagatcggcggcatttggtgcttttctgagctttgccttcatcatctgggctttgagacgattcagtgccgtcatatcgaggtgacgggtagtgttcggaggaggcacagtgtccattttcttgccttggccttcggccttcagttcctgctctggatcacgaacatgttcgagtggacctcttcgaatatcattttggagtttcctttcctggaacagctcgccactaggtttatctttgcccacataggacttgccatacgttttgcgccgatcaatctcagtttcctcctcccgagcgtcgtcaaaggagcgaaggtctccaaaacgctcagtagcaatatcttcaataggcctgccactttcctccgcctctctgtatacacctttgagtttggtcattctccattgtgaccccgaatccccaaaagtatagtccacctcgtgctgagcaggttcatcttctatatcttcgagtgtttttccatctttgagatcacgaagatggtcgttgagctccttgtcatgaatcttgagttcgtagtccgccgaaagcattattggtttcggctcctcctgtcgcgtcgaatccggtcgatgaacatattcaacgtcgagacccgagggcgcttccatccaggcgtcccgtttgagattactgggctcttcctgtactattaccggaggagcggtggattcgccctcatctttggaattccggtgatggcgtttatggccatgttcgtctccttggtcgtcggaacgacgtgaacgcttgtgtcggcggccatcgtcgtcgcgatgcctggactcgcgaactcgctcgctgtctcgatcgcgagatctggaggaatgccgccggtgatggtggtcggaatgatgacggtgttgtctcgagcgctctttgctgcgatcgcgatcgcggtttcggtctcgatgatgtcgcccttcacttttctcgtgtcgcggctctttcccgtctgccaatgatttctcaaaatcttctagagtcatggtgttcctgatatgtggaaaagggatgagaaaggcaaaatatggaatgacgtttataaaatgccgggcggtccaattgtagatctttccccgcgacaaaaaagatttcgaacagaagagaagagcttatctttcatcacttggcttcttgtcttccacccttgaacaatacataatcgactacagagctctctgtaattttattcgcttgatcgagtctatctttctataaacttccttcaccatggcatctccggtggccgtggtctgcgtgggcatggcaggtaaggatgctgatcgcccctcacctatctacaacgatctaatcgtcagtgttatggattgaataggctcaggcaagacgaccttcatgcaaagaatcaactcctatctgcatgaaaagaagaccgtgccgtatgtgatcaatctcgaccccgcggtgcattcggtacccttcgagagcaacatcgatatccgtgactccattaattacaaagaagtgatgaagcagtacaacctgggtcctaacggaggaatcttgacttcattaaatctgttcgccaccaaagtcgatcaaattatctcgctcctagagaaacgcaccgccccgaaccctgaaaacccttccgcaacaccaatcaagcacatcttggtcgacacacccggccaaatcgaagtctttgtctggagtgcatcgggcagtatccttctcgagactatggcgacatcattcccaacggtcatcgcatatgttatcgatacgcctcgcgcaagctctaccagcaccttcatgagcaacatgctgtacgcatgtagtatcttgtacaagaccaagctccccatgatcttggtcttcaacaagactgacgtcaaggatgctgagtttgccaaggaatggatgaccgactttgatgcattccagcaggctctgcggcaggaggaagacgcgggggcctttggagctgagggcggtgccggtggctttggttctggcagtggatacatgggctcccttctgaacagcatgagtctcatgttggaagaattctatcgacacctcagcgtcgttggcgtcagctcaatgaccggcgatggtgtcgaggagttcttcgaggctgtggagacaaagcgacaggagtttgaacgtgactacaagcccgaattggagcgcaagaagaaagagcgcgaagagcaatcatcatcccagcgggagcttgaacttggaaaattaatgaaagacatgaatgtgtctgggtcaagccggcagccgccgaggaaatccaccgaggagcctgagactgtcagtgaagccgaagatgaagaagatgatatcatcaagcgtggattggcagatggagaagacagtgactatgaggactacgtggggcctaacgctggcaatgatgagggtcttactcaacgttaccaggaggctctggcaggctcacaaagtactccatcagagcaggataacagcttcacaagatatctgcgcgcaagcaatatgcaacagtgaagcaatctgtcacaaaggggtcttacttgttctgaataggctcggcttacggcgtttgtggtcttagaggcgcatttcattatatcaaagtaatcaaatatcatcttagtctattttgtcttcgccttggtatagtaacacataccgggtgaacctttgcaaacaagtcaaacggcaatgttgctgtatgacgtcacttgctcataatgcagcagccttaggaaatgatcgcccagaagcttcatcttctccccatttctgatacgagctacttcaatctcgcgagaatttcaattccattcgaacacatactagcgaatttccatcatggatgtgagccaatcctattactgtctccaagcgtcggaagatagacctcgaaaccggagccaaaagctaacttgacaggtctttcgcgcctacacatacacgacagccgcatggctgtcacttcagagtctacctctgatagccggaccgagcatgatagtgaccctgctcttggatgagactcggcctgcttcccgtatgtggcctacctcctgaatgtgccgcgcgcacccgtttacgagccatgctaacctttcgcccttgaaaagccattgaactatacttcgcccggtgtttcggcttcagtcttctcacaattgccgttttgaccatgatgctgaccggctccatccccctgacggccgggatcagggagtctgtgtcaacagaggacgacgatcccaaagcaccatacgctgtgccaactctgatggtgacctctgttttccacaccacatgtgcattttacgcgtacacctggtatgtttccggtggatcgggtatctttgctgttggtgttgctggatactctactattgcggccattgggttgtggtgcatgctctttggcagcagcaatggaaggatcagtcgccgtaacggtgcagacaagaggacagcggggtttcctttcaagaactcggaagcagcgaagaaacataacaagggtctgtaagctgccgaggctggaatcaacactgcatccatagattcaatgtgaatatcgtatcccagtgttttagtagaataaatctgctattcatcattaattccaaaaagataattcatagaagccgttttttttttgtacctgagatcctcatgatgatccgagcttcccttaaccccacaatgccgcttcaaccgtccttcttctcctcaaaagcagcacgcctctccacaactttatattgtttacaagatggactctgagctacgactgtcgtcgccccgcttaggaccttcaatgtcaatgaatgatcagtctaacctacagttaggccaatttgacccggaatcgcaacccttcgggccattccgtcccccgaccgaaactgaatcacagctccagaacgcgacgcatgcgtttattcgtcctccacgatcaggcgagtcggcgaataacttcatcactacgtctcaatccacacagcagcacccaggtcaccctagcaatggagttgcctcgcacttacaaccgcaagggcaatcctgtggtttagatcaatcgcaggactacaataatggcgtcgctcatgcagcgaatatgagtggggcattgcatggcgctactgctggacaaatggcacctccagcatcgctgtctcaaaacgagctagcgatgggaaacaacgcgcatcaaactcagaataacagcttaacgctgcagtcccaaggccaaccgtttcaaccagacttcatcgagctggatactggctccacggattcagtggccttcaatgggcccggagaactgcaaggcttcaaagtggtcccgaaccctccaaatctggattactggagagataggttattcaacgtcgatgaaatgatcaccctaagcgaagaggagtatgcaggctccattgttggaatgattgataccctactagaggctgactcgcacatttctacagattccaaacctacttcccccacgttgacaatgtatactctcatcgctccacccagcggtacaagcgtaaacccttcgtctcccattactgggactgtcgactcaaaggacgaccacccggaacccccaaatccgacgacccagaaaaaaagaagcgcaagcgtacggccagagaacgggatctctgccatgttaaaatcaaagtcgtggaatacttcccagtgtccgaaatatcgaatttgcccgatgcagtcgagcccttgccatctaacatcttacctggcatgtatactttctctctgaatgacgactccgcgatccgaaatgtccaaacattcggtatgctcacgcccaatcctggtctaccaccaaatcacccgggatcgaacggtggaagatatttcactatacagcgggtgaatggcaatggtgccaacgggaagaacgacggagtgagcggcggtcatcaacatacgcttgaagaaagtgatcgtgtcaagaaaagtagtgtgcaacgatacattctgaaggaaaagaaagataaaaggacgagagcggtatgttgatcctgttttgttgtgttcaattgcacaagagtatccccgccggctacgtcacaagtctacattgacttcatacttcccacatgcgaaagatcttgtctcatccttttgttttcatttctatcatttttaattgtgcagatttaacacgaaatacacaataggaccgagtcatgtctcgaccaggccaaaaatcataccatacaaaagcaacgggtctggccgctgaaactgcgatcaaacactctgccgatgttaatctcaagctatttgggagctgcttctggtgagatcctcccaaatttaactgttctgacgaaatcttgttgtgtattgacttaacctgcatttgtagcccattcgtgcagcgggtatggatcgcattggaactgaaaggtatcccgtatcaatacatcgaagtggatccgtacgaaaagccccagtcactgttagaggtgaatccaagagggcttgttcctgctttgcgccacgacgactggggatgctatgaaagcaacgtgttgttggaatatgtaagaaaccccgaggagccaatttctcattttcctcactgatcaatcccttgcagctggaggacctgggtgtaggggctgcaatgcttccagtagacccaaagctgcgcgcccattgccgattatgggcggatcatgtaagtagacacacaggtctgttctggatcatcgctgatagccctccaggtcaatcggcatatcgtgccgagtttctaccgtatactgcaagagcaggaccaacagaaacagatcgagaagacacaggagctgcgagatgcgatggagaagctgctcgaggtagcgcatacttcggggcccttcttcatgggcccgcagatgtcccttgtggacgttcaagctgcaccgtggatcattcggctgcggcgggtcctgaaaccataccgaggatggccagatgccgaggagggaagcaggctggccatctgggtgaatgcaatcgagactgatccgcatgtgcaagcgacaactagcacggacgagttgtaccacgacagctatgagcgatatgcccgtgagtatcgctcccatgcctttttcaatagcattgctaatgcttcatgtgacagagaaccgtccaaatacatcccaagtcgcaaatgcaattaacgcaggacggggcctcccttaataccagaacaacgatatctgatggcgtcctgggacgaaaaggtgttggccaaatgtacattagcctgttttagcacctcgattgaaattgaatccacccctcccacttgcatcagggcctcgaggactgcgcaccggctgctgtggggcttgagtgtcggagccgcttcgctcgacttgcggacggccacctctctgtaggaagggtgcattcgacttggaagtagagggatcgtagagatgtctggacttgctcgaggtcgacgaggagtctctcttctggtgatctcttccgccgccacgtccttttcctctgaccctgccctcgcctgtaggggtttgacgaggtggagtcgtactaccgcccgacgaggtacccgaggctgtagcagatgggcttccaaatagacgttcgcgcacttcttcgtacttccgctgcttctcctcccgattcttcagtgcaatagcatggcgctcctcgggtgttggctggggcggcttagtgtcatcgtccgagtcgtcatcttcgtctagtccgagtcggccaaggccagccgttgcggcactgattgttcttgaagatgatgaatgtcttgtcacaagctggggtttccgactcagtagtgtaactgcgggcttgaagtcttgcttaagaggaacatcggcgcgcgcttcgacgaagtgaaatgtttctgcggattcactgcaacacagttcagtctcttgaacaacccaaagaatgacaaaagttaggtggcgattgaaacttacgcttcagcccatagctgacgattgaactcggcctgttccgccctgcgttgcgccttggtcaccttggatgagactttcttctcggctggcggggtagaattggagtcgagtctctgtaaacgatgacgatcagcatgccaccacagcttacaagcattgagtagaatttgatagcagactagtgtctgtcccaaatgtcacataattccctgagattacatacatctgcttgattttcccaggaatcctcccaggcatcgggaactgcaccggagtttgcgctcattgcactcataatgacggttgcaggattaagaatagagaaggatactgaaaaaaagaaggacgacaatatgctaaacacgaaggctagcaataactcgtatgttcatgcagcatataaactggggaagaaggaagaagaaaattcatgcgagccccggggccaccgcctgtcgaccgttgatctctccactccccgcgccctgaagtctgagaactttcgaaactacgaaaccgaccatcgagctcatttctgctaattcccaacaatggcgattggtaggtctctcctattccctcacaagctacacgatgtagccgggcacagtgggccccgcgatatcgatagtgctccatacccacatgtgcaccggcctcttattccatgctacaaactagagactccggggttacatctactaacaaacaccttctagaccctagagacccagacggcgactctaccatgacctcttccgtcgattccatccggcccgacgacggcgctagagccggcgctcgcactccaactggcaccgcccaagcttcctcggccggcgttgacgtatcggagctttcccctcctggctctcagacaaagcaagaagctggagtctctgctggtggcattggggctgcgctggaacagcgcggaggagggtctgcggagaaaacggttgacttaaatatcgcggcgtggaagagcaagcgtgctcaagaggaatatcagcgtgctatggagtatgtcattgataaagatttcacgctaggtatgtggctttctatatgtacttcgtctggctgggtggtttccatccatggatgtctgtacagtgtgctgactggatgccttgtgttcagatgaattcggggatccttttgatgaacgtgacttagcagagaagttgctatgaatctctgcatgtcggagaccatctactacctgggcagcatagatatgaataatgagatacgacttgattatttagcttgtagttcttttagtacttttggtttacgatgagctggcggtcttcgctcacctatggtgacatttgtacgcggaattgcttcgaatcactgctattcaacgtaaagaaaagctgctccaggctcattcggtgcgatctacaagtttcgttgcctactacgcttgtagatgacttttccgaaaagacatcctatacccgagctttagggaaaatatatgtaggatatagcaaatcctcagagccactatatgattccaattggctttttttctatgcttttgtgctctagtattgctatttgtagttctcagttcgtagttagtagcttgctagtcggtgaagatatatagtcaagatatatatcgaattatttactccgtactatttgatcgctggcaaggattgcaattaatcaacagacgtcaccacaacctccaatgaaatcccatacattcatgctatgatcgcccgatctccacgttgggctctcccatgcagtggttggcagggcaaccgggggaaagacatcaaagcaaaaccccaacggcccgcttcatgactttcacatctatcacgacaatccgacaatccgacattttactgaggggcaggctcagttgcatccttcgattcacatttttaaagtagatgacttgccttgattcatttaactcgaacatacttggtccaacatttcaacagctttgacacattccatacgcgtcaacaatcatggaaaaccatcctccttcaccgcaggcatggtaggtcaattgtttctttcttgctgcttttggattcaatcttttttttcttctttcctttcctttgtctttgaatgatcatactcgcctgtcgctcaggtgtttggtcccttttcccctattttgagccagaccgctatacagacttgagactaacgcaactgccttacgcgctagcagctctgccacaaattccactgaaagttccttcagtttcacgcctatcaaagccctgagcgccttgccgcgactgtgggatcgtaaaccttctacgcctgtcagggcaggagacaaaacacgaaagctgtggaagcgcattcgctttccgtttacgagcatggttaccacgacagaagtccagactacgggggtcggcgcctctaaaaactcagattatcagcgtggcgtgaagcgtctgtgtgttgattccaccggcgtggaccaagacactgaggctgagcgacgcggtcggtctttccttgagactaaatgggagatgcaggcatctcgtaaacgacgtaagtttcttcctcgattatgggggggcatctgcacatcgcacgtggcatcccgtgctcctgcatttagaaagacctttcatctgataatttgcaggcaaaatgcccgaattcgatttcaacatccacgacgagggctcccaggaggtgtttagtttcactgcgaaccagcccaaggagacgcccaatgatgctgtcggcgacgtagctacgaatgcggcaccccagtcgctcagcgatctgtggaagacttccaagacgccggtctataacgatgccgtggcgaccgacctaaatcttactgcatctgacgcgaagacagcgcaggatgtgcagtctagatcatgcagccaagacgcgccgattgtgatcgacaatacaggagtcgacaacaccaacttcgtgtccaccacggaatccgtgcaagcactgacgcaagagcaggaggtcaaattggtacgatcggcactgcgaagctccttggatggagagaatgcagagctgctcaacgactttctgtccagggcgaatgcgaaacgggccgccaaggccacacatcccggagatgcgaaatcaacggagatgggttctagcccagaggagtctccagaagttaaatgctcaacaccgccaccacgccgcgtgttggaggaattgacaaccaactcaccttcacccgtcaagttgcagttctcgcctagtaaatatgacgtcaagcgtggtgccgatggtgcgggtgagcggggggatattatcaccaaggaggatatcattccgaaagagatcatgggagaacaagctcctgcaagccctgcatgtcgtcgcagcacccgtaccaaaggcgtgaatgccccgagcatgcgcaacacgatctcattccgccgagccaaaggcacggaattcgtttttcaacagcgaactgagagccagcagatggcaatggccacaaagcgcaacacccggctcaacaaaggcaaagctgtaactcctatagtcattttgcaagcgctggctcaacagccgagcgaggaagagctgttgccatgcaatttacaaaatgagggctcgagccaccaggacactaacaccggtgcactggctaaatcgcgaaagcaggtgtcgtggaatgaagagcgcatggccgagtatgaagaatacagagagccaatggacgaccaggaggatgaagaggagggcgatcggtgcacgaatgacgtgggcgcaacgcctcgcccgcaagcagaaagcaagcgctcagcgaagaaagcagagtccggtcatcgcagcagccgtagccaaacgcaaaaggccgacgcgaatgcagacagtggggccaccgcgagcggttcaaccccgactactgcagctgctactgtaaccccgcgctctcgccgggtgaggcgtttgggtgattcgggaattttggggtctggacccccagttaagactgcaagtcgcagcacaagcaagcctcctgcagcctcgtctattgtggctgctgctgccccctccacacctaccaagggccgccgcaagcttactcccaagtcccccattccctcaaagcttcccgcacgagcctccaagagtgccaacaccgcggaccagcctttcgtcagtgggatccccactcgcagctcacaaagcacagatgatgcacagcgacagagtatgcttcagatgagtgccgggtgtacgcccacggctcggcgcgttcggtcgagatattattgattggatatgcattctcattggattacgactactcttctgaccgttctataccccggttcccattgtgacgctctttatttatcgggggagttgctcgtgttttaagataccaattgctgtttttttttctttatttcatgtatgcattcttattgaatttgtaaattgttccctttccttcaccttcatcttgatcaagataagattcgctgcacggttcacctgctttatgcaaaatgacgtctgtgccgtcgcgccccctcggctgcccctcggctgcccctccaaccttggaaccttcgggatttgtctgagggatggaatttccaatctcagaggttgtgctgtcctgttttcattcggactacattcggactacgatcttcgcgttgaaaccaatattatgcacctaaccgcattgacaagctctaatagtctgttccgttgatccctcgtgccagcgaatcatacgaagtactccgtatatacggctgccttccaaggctgttacctgtactgatagccgatacatgctgatcgttgttctggtatttgcaaattgtctctaaaccgagctgggatttgcaatgtctttcatacaatgcgtattgtagatgcagttgtatctcatatggcgtcctcgtcgagcctaccttctatgttgtagtacgaacatgtccaatatgaagattggaatcctacaccagactgctccaccccaatgatgcagtactccatatgctacccactccctattattgaggctgggaaacaagttcacaatccggctatgtgcattccaatcctccgaagttcctccccatcggctcgtcggtcaacccgacccaaaaggtctcagattaaaaagtcaaagagcgtttcatagcccaaacaaatgcggcattaaaccccatacagaatcataaataaatccgatcaatcggcccaatggaaagaggaatgcacgtactccgtatagtacaatacaacatacatagatactacctactatgcacatgcaacatgcatacatacggagtcctccccgtacctataactataaccatcacacccgataaaccaatagcgaataaccccccaaaccgccaagccccattccaacgaaccacctcgggaccaccacaatcaaactatccccatcaactacccttaccctattcggcctttcggtgttagccacaagcagtatgccatccgactgtaatctgtaatctccaaacatcacacccgccatccgatatctcccggtggtgtggtcggtagtcagcaacgctaagacccgatgcggtaagtgcgcgcacaactaagcgccttaagtggcgcatggggttccgagagccacatgggtcaacgcgagatgacatcgtctgcagggctcggagcagtgtgctccttgctccttgttttgcattttgcacatggaaatgaaatgggagtggaattggaaatgatatccgctttttagggttgtatttttggggttaggccagttaaatcagttaaacaacttacaacatacaatataggttgtactatgttgtatacgatggttgtatggtttgttccacttggctgcttttgtatcgctatttccgtcttaaggtgttggtgttggcttggctttggcccttgtcaggtacggtgtaaccctactttggcttttggattatttttcttcggggatttaattattggttggaattgttaaggtgtgaagaagacatagtctatgttgtatactaacactgttacaacggggtccttttgcaaattttgcattttcggtactccgtaccaccttccttaatattgggtaatcttcccagtccggtttgactcgccttgatggtggatttggggcgggtggttgtggcagccggtgtatgagattaagtggtcagtgtcagatcaaatggaagaggcggctcaaatgatacacaatctacagtacggagtacagctgaaacacagtaaacacaataatagagtaagatcatggtatgtccaattcatctgatagagttcgctagtcctttcattaactcatttccacccaccccccttggggtattgctcggggggattattttcgtctttttgtaagatggtcaggaccaaatctagtctttgtggggcgcagtgtgaagaggctcctcgggccagttgttgtagccgaaggtctcgtgcatgttgacgaagcgagtgtgacggcccttggccaccgcattcacagcctcaaagtcttcatcggcgagctcaatggtctggaagttggactcaatgcgcgccgggttggagctcttggggacgacactgtatccacgacgcagaccccaggcaatcaggacctgggcgagcgtgtggccacccttcttggcaacatcgttcagggtcttgttctcgctgacccgctcgcctgtcgtggggacctggttctgcgagcccagaggcgagtaggcctggggcaagatgttgtgggcgaagcagtactccaccaaggcctcgttgggcaagaaggggtgaatctcaatctggttgagcataggctggaccttggcgtacttggccatggcttcaagctgggggatagtccagttggacacaccgatggcccgggtcttgccatcggcgtacagcttctccacggcgcgccatgtctcctcgttgttctcggtcaaatctttgaggatcacgtgctagaacgggttagccgggagctggtcgtgtgctttgcggggaaagctcttctcacctttccatcgggaccgatcaacggcttaccctggccgtccttctcgcaagcaataggccagtggacaaggaagaggtccacgtagtcgagcttgagacgctcgagagagttgttgagggaccagaggacgtcatcgtagcggtgcaggtggttccagaccttggtgcacacgaagatgtcctcacgcttgacggaggggttggtcttgaggaaatcatggatggcgtccccgacctcaccctcattgaggtagaaccacgcgcagtcaagctgacggtagcctaccttgagggcagtcgtgacggcggcgtaggtctcgcccttggagccctcgttggcgaaggtaccgaagccaacggcgggcattttcacgccgttggccaatgtgtaagtctttccagatgacatgattgcaatgtagttgttagagaacagaagggaaaaagtacgcagaaagtacgagctgttggaagtagaagataaaagtgggggaagcggtgttggaagtggggtaaaaggggttggaggggcagaagaaccttgggaatgggaattatataacactttttcaattgaccttggaattgccgtaacgatgcaatctactgcaacttagcccgacctgccctgttccacctgtcgatccaagccactggctctgatcatcctgctctggcagagtcaaagacaccatcgaatccccaaaatgactaaaagaaacgaaagcgaggacaaaaataaaaagaataaaagaaatcaaaaatcaaaaccccaaaaagaccgctagtaattttcaaagctccgtgcgatgacatcatcaaccgaaacggtgcgcttggcctgatcgtcatcggctccatcgatctcatgtcggcccacgggtgcactgcactccagtccaatcgtctgcccgtctcaggcctctctctacccactcggcgtgctgggttgcttcacattcggcccagcaactctggtcctggccaatcagcgtctttctgattttattaggccgcgggaagcaacacgtcccgtgtattgggtacctagcaagacacggtgccagccacgatgacgcaggtaccctatacacgcctgtctcgttgcgagaaaacggtccaccctatcgctcgccaaatgatgtcttgccaaatgatgacgataattcctaggaatgatgatacccggtgagtggatccttcgtaacctcaatggcaaaataccaatttcgtttgtctccattatttgcgtccggtatcagatatcgcttgtatatatactctcctgaactccctcctccaccacctcccttatcagccaattttcattccccttctccctttttacaacttcaattctttccttgagtcctgaatccagtgactcccgagtagaagctcatcccatccttctacccctctatcaaactctatccaataccttcatcatgtctcgcgtcgaggactctgacctcgcagtcgacctggctgagcaggatccccgcgcccaggatcctcagggtgccctctcccctcgggaccagcgtgctagctccggtctcgccatcccatcggcaggcggtaacaccgtcgagatccccgccacccgcagcgccatcagtgatgccgctcaattcatgcacaacttgagcttgtctccctccatgagggaccgccggggatcgcgtaactcctttggcacttcgctccctatcccccgctccccccgcatgtcccgcctctcgtccgtgcagcgcggtgctccctcagtctcccgcgatatcttggcctctcaggttcaggatatcaacaaggagctgactaccaaggcgaagaacatggcctttgctttcgatattgatggtgtgctggcacacggtaaccacgccattgacgaggccaaggtcgtcctcaagatcctcaacggcgacaacgagttgggcatccgcatcccccacattctcctcaccaacggtggtggtaagaccgaggaggctcgctgtgctcagcttaccgagattctcgagcagcccatctccaccgaccagttcattcaatcccacactcccatgcaggccctggcagagtactaccagaccgttctggtcctcggtggtgaaggctttaagatccgcgaggttgccgaaaactacggcttcaagactgtcgtgcaccccaaggatctcctcgcctgggacccctccatctccccctgggctactctcaccgaagcagagaaggccgaggccaagccccgcgacttctccaagatgaagttcgatgccatcatggtcttcgctgattcccgtgactaccagaccgatatccaggtcattatggatctgctgctcgccgaggacggcatgatcggcaccaaggccaaggatcccgtcgccacccgcattcctatctacttctcccagggtgatctcctcatgcccaccgagcacaagggtcttccccgtctcacccagggtgccttccgtatcgccattgaggctcagtacaagacactcaccggtgtcgacctcgagcgtgttgtctacggtaagcccgagcgtgctacctacacctacgccgacgaggtcctgaaggcctggatggaggagctccacggtgtttcccgtctgcccgataacgtctacatgatcggtgacaaccccgcttccgatatcatcggtggaaacatgtatggctggaacacttgcttggtccgcactggtgtcttccagggcaaggagggcgagaatgaccccaacagccctgccaacttcggtgtcttcaacaatgtcctcgaagccgtcaaggctgccctcgccaaggagctcggccccgacttcaagctcaagtggaaccccaaggtcaaccccgtcactcacggcgacggtgcctccgccattgagtaaacaattgatcactctgatcctttcacgctgaaacgaaactcgaaaaacatgtgatactgggcttgagaaggatttcctggcgtttcgtgctttttttcccccatatcatagacttcttttctttccatttctctgttaaggccttctgatatcctttgtcatgtcgatctggattatcgacttgatagactgatatttgctttcttttttttacaatgtggatggtcgatggtttcgacctgcttttttcccttttagactggattgctacatatctcatgtgccatgacgcgaataaccttttgttttgctatatcccgatactccaataccatatcaccagtttttatcattgatgtcgtcaattaaatattcttaatttgtattcctttttctagaaaactggtgtattccaaaagtttgattattccagaaaaagcactcattgacgacatggtgatgtattctccttagtactagacctcttgtggagggatcttctattatttcccacgtctatatccaggtctatccatggatgcgtgtagttagtattctttaatacttgacttttacacatgaaaacaagcgtcagaaacaatatatttacagagaataatatcaaaatccatatccgtcaaatttgtacactttcgtctagaccacgcctggaccactaatgtttcgggaaacctggaaccagaagaaaagcaacaactaacgtaagacatcgatacaaccgccagagtggcaaacaaatacccggcattatctcaagacacgcacactgtgagtcgggtaggtacacaatatttgagcgggcatgtatgtgcctcagcaacgaggtatcggacgagtttattgtctcgattgcgcgtacgctggctgagtcgttctttggagggcgttgtaagctgcagcctgcagttccacccatatatcataggatacatatttgcatacagagaacttttgcgggctcctttgctggtttgcttgttgttgtcagtaagcaattgaagagcgcatgccatatcatagattcacacgaaaaggaatccagaatccagctctactgattatcccacggttttggacgcgaacaagaaagcggaaaggcgcaaaacttgtagaggaagactagttatataaaggaggactatgacagttaagtctaagaagaccaagctcagatcagagcagttctgtgataaagtatattcagacccattgctcacccaatccgcgactatctcatcgccgtattgattgatcgaactattgtataattcaatgagaaaaacccattgtatatcctagtgtaacttacggatcggtcagacatgaaagacctgtggaataaagatagcgatccgtcataaatgtagctggctacaatttagcacgggagttgtgagatagcgactctaatagacgagtatcttactaggataagcaatcgaaccacctcgaaccataacatcggttgcctcagtgcatgcagtttaaatggcttctcgcaagatcagagcgacatgtactttcacacagggcgacaagttgctcgctagggacaatatcaaagcttgcacttctgctagatatcagcaaactcaaccctaatgacatatctgtaccgttacgattccaagaaacatactcaactccaatgtagccaacccaggcaggacatgatgttactgtggtattgactgcgtcgaagcaggcatcgctcagacccagattatcatatggcatttgatagccatcgagctgttggtaggtgactaacatgccaaaggagcccatacaagacacatgattataatcattgtcgtttcttcggtcacgcttgtgttgaccaggaagaaaagggaaagatgagatgagcaatccgtctacgagatagtgctttaacaaatccactcttcttccttatttcctatagcaccgagtccgggaggaaagaaaaaggaatgtcgcctgcgaatgctaaacttttcattttagccaaagctccaggcttaactaggaacttgactagtgggcacagcgggaccccaagaacctgcacctcttgtcgttccaaggtcatcaatagaatttgttccctcaaactagaaccctatcaggtcatgtgatagagacaaggattccttttcggtggctgaaactccaactccttttttacaattctcaacaatgttcaacctattcttaaccgggctcgtggcatttctacaacctgtttctagtcgtataatctctgcattacatcagcgctgtctaccatggagctctctagcgagcctcggccgaatcaccagaaagccgtaacatcagcagacacgcaccatggacagctataggcaaatcgatgcctcctccaaacaccccgggaaaaagcgagatctcccatggggattcgcgatctaccactgttcttaaaaggacgagagcgtctgtaatcgtctactccagtacataaaggaacaggtcaaagccgatcttgaaggcaaccagagaatggaccttctactacatcaccagctggtcatcaacaatgacatggcgaaagtcaatagtgctgcatcccatgagattcggaaccacttcaacgaatgggttgcagatcaactgcctcaggtcgtcgccagccctgaaatgctcgaatatctccaatctcagaaacttcctgatcatcgaggtccacagtacggcctcggtgcgcggtataattttgcctctttgtggacgatttctgcttggagtcaatcaagtatatcaatgattataggttcgatcctgttgtcaaggttctgtcagggttctggggcaatatgactccccaggagagggaataccaaattcatcctgattggcatgatggagaaacagatgatgaactcgaaatggctggctggatgcatattcccatacaaacttatgtgcggtcgtatgatggtctggaacagccgggggattgggatgaatattatgtacggccacccttgatgttgaacggatccagtgcattattacatctagacgaagagctcgctcaaattgaccgtgagttatatgtggtctctggttatggtataaatgctagattaaccgaaagacaaaccaggggattgaactcacaatttcaacgtagcatatcatttgtttataatgtagtggcatttgagcacgaattttggaatgattagttcaagaggatccatagagcaaggagaaggatcaagacaacatccgcctccttgtctagttagcaatgcggagaggcttggcggcatgcacaactccgcggaagcgcaccttcatcacgaagcatgcagtcaagcccgatgctgtaaaatatactcacctcgacaggcaaatccaagtgactcgcacctttgaatctagactgggttgcattgttgctaggttgcatctctagcgcgagaactaagcctttgccaaccccgttgggcaagtcgtacgaaccttggaatgatacagtgcgagtcagcgagccagccggtccgacttcaacccggaataacaaggcaagagattgcagggattgttctcttgccgtaggaggtaggaggtaggagacagaaacggggttgtatacctacaacctatgttgtaggcttcgctttgacagtggatcaggagacaagcaaagtcggtgagagtaggaagtattccgtatggcgtacgtcgaatacgaagatagtactccgtactagcatcacccaattgttagaccaagactagtggattggttctccatcggagctccgaaacctcgagatcatccaattcgcgtctgaaaggggacagccgtggccggccgtacgttgtgggttctcattatgtaatagcgcctggatccccgcatgatcggctccgagagaggcgagttcttgggttgtcgatgtacatgggaggtttagctgcatggatggtaatgcgttaggtaaaaagaactctggggtagaggaatcaggatgcatgggatttgatctgctgacgtgtggatatcagattattattgcggagcgaagcaattatatcatcctactatttaactacatgtcactattattgtattgtcttatatgttgtagttgtagttatcctgttctaaatgtactaatagaatgacggcacgtttccgcatgcgtcaaaaaaagcaactggagtctgcaggggtagctcgaactaacagaacttaatagcttagtgatataagaagtatagatgtagtaactatagaatttatatttatattgctctatttatatatagattaccttcagaatactaagaatactataagaatacaatacagatccgtaatcaatcagtttataaaagtcgccccatgtggccatgacccatggcgcatttcttagcatttcgtactcttcgaccttccacttcacctccattctgtacttcgcccaaagaaccccataaactcttaagccctcctcttccgatcggagaaaaccctgagattacctccaaattcgtgtaacgtcggttcatccgtttctgtgactaacagcttcgttttttttcttccccgccgcccctctgggccctaaacttgccctccggtctcaatacttctttgacttgaccggggcttttttcttttctttttccaatttggagtcctttctcgtttaaatttcggtataccttattatttttttcgttttgcctgctccaaggtactccgcgactagtcactgtacacttagagccctttatagagggcctcttcctctgcaccatgacctccgttactcctgctccttcgcagaccaagccggccttcccccgactctcttcaatcccctgtggtgatcacttccactctcgcgagtcgtctccctcgccctgcagtaccccggacggttccaggtcgagcagccaacgtcgtccctcattcggttctattaaagaagatacggaggacggtacgtaccgcagatgtgcgaatccaggctggaggctgacgtgatcatgggtaatcttaggaatcgcgcaatcgttcgtggacacgcgcgaagtaccatctccccaagacccggaccaagaccaagagcgtaaggtcgagcgccccacccaaatgcagcaggccccggatttttgctgtccgtgtggtggattcctggggtggaagcagattcgattgggtgggaagagtctgagccgcagctacagcgatctccgtggactcggaagcctccaagcaaagggctgggcatgggaagcccaggagccccagactatggagcttctcccaccgaaggtccccgaggtagagattttgcagacccctcctggtaaatcatcgttggagaggttcccgccggaggttcttggtaagaacccgcactgccgttcttgtttctcatgtgctaacgtcttgtagatcaaatcatctctaaccttgccgtcgatctccccccaaatggctacgccccccgcaacgtggatttggtctcgtgcctgctaacttcccatacgttgcacgctgcgaccttgggtgtcttgtacaggaacatgactttcccacactccatcattttctccaaggcactgaatcacatgtcgcagtatccggcgttgggaacattggtgcgccgtctggacttctcgcacttcacctccgtcggcctaggtcgtactaagcagatgaacgcagaaattcagaacctgacctccaagaccctattgcagtgcttggaactcctccctaatttgaaggaatgcctgctgcaggaacacctagagggcgacatcagtgtagaagtggtccggaagctctttatggggctgccgaacttgcgcgctttggatttctgcggttgctcgactcaggctttctctggggttttccaggaggctttggtcaatgggcctgcgctgtccataactttgccgaacctgaaacggctctcgcttcacgaatgcagcgctatccccgctcccatgttcgactacctcctcccgcgattggtcaacttgacgcacctcgaccttactcacacccaggtcaacgattcagctctcgttgccatcccggagactgcccgtatctctcatttgagcttgtcccgatgcacgcgcctgcgcgcctgcgccctggttaaattccttaccacccacccctcgatcaacgattctctcgtttatttgaacctgttgacggacccgacccgcttccgtctgctggaagagaccgatgtgtctgctctgctgccgaatctgcccgagactctccgctccctcaacctgggtggagccaagatcacttcggaccatgtaccacacttggtgcccctgaccaagcacctggaggagttgggtctcagctctgcggatctctcagttgcggacgtcaactcgttcttcagtccgtaccgcaaccctgccacgggaattgaggttgatactcccagcactctctgctatctcgatcttgccaaggtgccgcagatgactatcggagccatcttcaacaccagtacttgtttcctgctctccgacaaaagctatcccttgcaggtcgttgaattcagtgacaaaattatcaccccactgcgtgagcgtgcgaagacccatcgcgcatccgttggctggactgtgcgagacctcggccgtcgtggctggtacgttcgcgaaccctcctccatgccccacgaacccctcgacgatggcgcccgttactggaagatgggtgcacgctggtggggtatgcgcaagatccccatggccaccggcgaggtcggcggcctctacggccactacatgttcaagaaatgatctactatgagcgttctgttctcaaaagcgtcttcgctggatccttttatcacttgttgctgatacccttgatttgatatcctttattttcatttgtgttttattggaggcctcgcttttcttgctttattgcttttcaccttttgctttttgtttcacgatgaatgataatattcggtctatgcatggcggcgcgcaacatggtttacgaatttcggcattctggctcctggcttcgggttcgtgttctcggtcgcgttttgtcttttggttttgcatagcatctgagatctatctcttccggtgtctggtctttctatcttatatctctggcttcatatggcgttactgtatttatcgggattttactctgctcataaatacctatctagtctctacttcatctcttataagttcaatatagttgactcgatctgatagccctgtgtcttgcacttcattgggaaggagccaaccaccgtcccaaataggcaactacctgggacaacatccagggcacgcgttctccagaaaacgcgcccctccattttattctttctcacacagatattttgctttgttttctcaaccatcctgctgaactgcccctagtctaccactcttcagcatgcttctttcactccagtgctataggtaagttgtatttcccatgctcactaaggaacccgaatttaatccaaccaagaggacctcctccaataccacaaggaaccgaaagcccagccgggaaatgaagcatttcgggttgactccctcctctctgctgtccatttccaagtcctgaagagacacattctcgagtcttcgacccgggaccccccgtctatgcgcgggtcttcttacctgggtgtttgccttggtcctgccagagctagcgcatatgggcttcctgtgtctcccttttagtatgggacggagaacaagagcatcactttcatcgctgtgatgtaaccctctgggactttgcatcacgatgaagtcgctgaggagatgatcgacctcccgggtgagttgttttacatgcgtgatctagcatggctatcaaaactaatcggagaaaggagtggcttcttgctgagcagaggcttctgaagaaagagcacatgattgcattgtcggtgacggcgtttctgaatgtgccatcatattgctgaggaacttcgacgctcagctaaggatgttgctggcggatgctagatttgaggactacaacaacgaccacctagtcctcaagaaagaaattcgaaacgcaatcctgcaggaagccagacctatctttgagcagatcgtcaaggaggaacaggaaaacaggttggagagctttctcaaggaccgaaggatatttgccatttgacaacataccgtccatggcaatatttccctcaaaattgatcttcatggttggatgccttgcatgggctggtgccatagttgattgtgatgaactttttgtttgtgctctttccataggaatctttctctctacattcttctcctcactttgtaagtcattgatatctctatctactgttatttttcaaaaagggctttggcaatgtaatttgttctccgttagaattccagcttcattcacttagggcttggctcccaggtgacgcttggcaaacgtcaaatgtcaacgtcatgtgatgaatcgcagaagagccgcatttctcattattggtttcacctctacacgccctgtctctcacgaaggtctcagacccccttcgccaacttccgcccttggggaattgctcatcccgatgggtggattcgttaccgcctttgaagacagtggaagctgtccagacacgcgacgatgtcacctccgagcggagcggcctcttacaagaagaaagatgggaccctagctatatccgccgatgagaagtcggtttcatggagtcctgcggtcgcaggggccgggaatacgatcacaatccccgtggtcaacatcactagtatgcacccaccccaccatgcacaaggtttgtctctttgctgactcgcgcgactgctagatctacaacagaccccagcctcgaacccgaaagtgatgctcaagatcttttcccaagcctccgatgcgcctccgaatagtacgcccgatcaatatgtcttcctgttcacggctggagcaaacgcccgcccgcaggccgatgtcatcaaagacacattgagtgctcgagtcaatgcggtgaagtcgggcacgccatcccagacgccgggagcaagaggtgcgtctgagggactgtccgcggcgatggcgattgcgaatgctgtgacgtccgccgggacatcgaagaaccccgtggacgaggagaataggcttcggtccgacatagaactgcagcagtcgctattacgatctgattcgaatctgcagcggatgtttttcgaggggttgcatacgaaaccggaagcgttgtcgtctggatcgtttgtgtcgcagttttggtcaacacgactgcatttactgcgcgcgcacgcaatcgaacagggccaaatccgtggctcgtataatgtgttgtcttcacttaagccgcgagtcgaggataatgtcacgcggttaaatatcagcaaagagcagatccagctcatcttcacgcagcacgcactggtcaaacgcgtgtacgatgagaatgtgcctaagctcagcgaacaacagttctggtcgcggtttttccagagtcggctgttcaagaaattgcgcggagagcggattacggaggctgatgcaacggatgccgtgctggacaaatatctccggacggacgaggctgctcagccggaccgcgacacgaatatccatcactttttggatctggctggcaatgaagtaaatcacagcgagcgtagcggaaatcggcctgatctagatatgagaccgtctggcctcgacaaagtacctatcatccggacgctgaacagcttgagtgaaaagatcatggccaacgtggctccgattgacggtgatatgagtgccccgataggcatcaacgaagaggcatggaaaagactccagctgcaggatctttgtagcgaagaacatcaaagtcccatcactctgaacattcgtgatcaaagtcgtttcttcactcatggccaagaggaggataagaccaagcaattcgtgaaacaagatccggagcagcttctgcagattctccgtacggagatcaatcaaaatctcccatcgcagggcaatacacaactaggcaagctggtggacccaggcgatgacgaagacgaggagatggaggatgcacctgccagccgtcgccctgtcggctcatctgctgctctccacgatgcattttcccagatcctggaagcgttgcgtgagcgtcgtgctcagatgaaggagcgagcgacatcagaaacatacgggctgtcgatagcgctctttgaccgcttgacgttgacacacgctacaaccacagagttcctgcaccagttctggcaggcgtttctctcaggcaaccccgaccgcgctggagaggtcgcgtctttagcagagtctctccatcgagcaatggagcgtattaaggctgttgctaatgacgcagaggctgagcggaaggtcgaagttgaccggctgaagaagcaggcccgtgacatgtacgagagcacggggcgaaaattgcgagtcaacttagaaggcgtggaggggggccagaaggttgtgaaccagcttcttggtcctacgctccatgcactggaggttgcatcgactcgatatcaaaaagaattggccgaacaaaataaagaagcggccatggctgctcaagacacggcggggacatagaagggaacaagccaggcgtttgagattggcgcatgggatgtataatatgataggttataagaagttcaatgattcattcatacagagaaacaaatctcgatatctcattaatctacatagccaagtttgtctacataaatgacataaaaatgatcacagatcggcatgccgagcttccccggacttcgggaccttcatgccatctgtcccctcaactaactactacactaaaccttctccaactccccctctccccaaaatcggatgattctcacaccagatccacactgaagaaaaaaaaggggcctcaagatgctcacctccggcctcacaaatgcgcccctcaccaaagcgctcctcatctacacgatcgcctcgtccatcgctctctccctcttcgacataaaacacctcgtcgtgatctatgtctcgccccatttctggccctactcccagttctggcgcgcattggtgtggcaggtcgttggctttaccaattccagtgaggccctcttcgccgccatgctagtttaccatttgcgggttgttgagcgcgcgtgggggaaacggaagatagcggttagtctttcttttattgtctccgtccccgcagctatgcgaaccatatgctacgggaaacagagaagccaagccgaatggcttcatatacatacgacctatgctaacaacgataactgctcgctagaccttcctgctcaccacactcccctacacaactctcctcccaccaattctcctcgccctgctactccgccctctctccctaaacaatttcaattacctgccctccggcccaacagccacgatcttcgcgctgttggcgcagtaccacgccaccatcccatacacataccactaccgcatcggctccacatccacatcctcccccaccacaacaaacaccaccgacaccaccaccagcaacgatccctctaccgaaaataccacatccccatccgaccctaaacccccaccaccaagcctctccctcctcctctccgacaaatcaaccacctacctcgtcgccgcccagctagccctctcccagttccccgcaatgctcctcccctcggccgtgggctggatcgtcggcgtcgcctggcgcgcggacctgctaccgggtctgtcgccggccagcaccggattccgcgttccggcttgggtcgttggcgagcaggagcggaggggtggggctggggctgcgtctggggcggagagggagaggtatgaggatttgcgacggagattggagggggaggttgcggcttcggcttctgggctggaggggtctggggcacaggctcagagacgggcgaatactgctggtgagggtggtgggtttgttagtcggttgacgcgtgattggtagtttcgcttgtttttttctaagtgagcttgcatgcaaggcttgtcgggcattttctatctggtatagatgtatgattgagatagttattgggtcttttgtaggaggtgctagcccgtcctcaaagccctatattcgtatatcatcattgattcatagtgtcccccaagttcaaaatctcaccaattcataaatatacaatacgataatacttgatcaaagaaagaaatgcataaagtctagaatctcaactagcaaggccgtatctccgctagagtatgtgccaattgaaaacaccacataacgccatacatcatgtctataaccctgaacggaatattaccgtccattgcgactccgtctcatattttccttgcactcgttacaataccattttactaatagagacgagactgttagcaacctgtatgattccaaggcaaagaaaaacctcttaccattcttcccaggcggtttcgtcaagcccacacacgacaaatggaaccattcacgcggacacgcgtcattgtcgcaagcaaccatctcgccgaaactgatttcgttacagtaacagtagcgcggctcgccctcttcgtcttcatcgtcgccctcgtggagcgactcgtcgtcggagggtattgcaggctgtgggatgggctttttctgggttcgtttggtagacgctgggtctcgacttcgcgtgggtcgtgcgtgttgttggctgggctctgtaaatgcggtgaggacaggcgttgatgtcttggaattgcgtcccttggtcgtctcgacctcggcagaaccggattttccatccagatcatcgcgcttggttcctgctggaacggatgttctaccgttggcatcaccgtcgtagtcacggtgtgggtctgggtggacaagttcatttttaacgggtccgtcccggggtgtagatctggaatcggcaactttgtctgcgtggaggacatggttaattgatagttccgggggaagtggttgaaacggcatactgttgttaggaaggtttgaagccgatgacgatggccgcgcacgcgaattgcctggtccagaattctgggctcgtgaagactgtggccttgttgtgttgggtcctggactagcggcagcccgtgggccattgaatgttccaatcaaaggcgatggggccagaacaggagatgcagcactagaagcgttggccctaaaaaaaagtcagttggatgcagcagtgaacacagcgaaatgagacgtacttcttccgggcagcagcggccgaattaggagcgcgagtccgcttcttctctactggttctttattcgcggctctctggctcccagcaccgctagcagagcgctccatcggagcactagtgtcaactggcagtgagcgctccaccttccgacgtttgggtgcagcggtggcgtcagccgcgtgatctccaccccgagatttcgcattgttgttcttgcgggtgcccgagctgcgcgtatcctcatagtctgcgtcggcctgtgcccgacgttgtttccgagccagaacagcatcgcgccgcgcctcactgcgactagcagcttcagcctcttggagcacgtgcgacagatcctgtctttgcgctaccgcttcccggcgcggacgttcattagtcgctgccttcgcggtactcttgttggagtacgcccagtgtgtcaagctgcccaagcgagcctcctcgctgatctcgcctgcaatgtatgggaacaccgtatccagtcggacaacctggcgatccaattcctcgttcgcgttcgaaatgacgtgattcttctcatcggcggtcatcatcaggtcggagaggctttggcgtacacgatcgaagagaagccgacggcttttgctctcggatgtttccggtgattgggatagttcctggcgcaagagtggcggtattagtagacgccgagtagacaattagacgaatcgcgcgggaagctcaccttgggcaaaacatcctcccgaatcacacccccaacgataggcgccgggtgtgggggatgaggaacgggctgcgactgggaggagaacttgagtaattgcagtagattttcctcgagagcccacgccttcgcatcaacttccttgagaagagagttgtggcgacggaactcgcgcggaagcgctgttatcgcatcggtgaaatgcgtgagcgcaggatagaagccgtggggaacagggggcgtggaaggaatttcagctgtcgagcttccgccgaacgcgaaggatgaccgtccggtggttttggagattcgagacgggtttgtacgtgtctgacgggcagactgtcggattccttggcccggcgtattgttgactgacgacgagacgacggacgtcgtgaagggcatagttgttgagactggagctgcgccgttggaggagagttgaggtgagcctaccccaatttgaggaggaaattgtgagatctgaagaatcaatggtgttcagcaatgacctgggaccatggacaagagtcaacacctcgcgtagcaacaaaagggcatcgatgcagaagaaactactgctgaagtttgcgtgcggagaagagcgattggcaatcgaatcaggtgatataggtgcctgcagcattaatcaggcatcagttgctgaatcatccgagcatgtgggtgacgtcatatcaggaacatcgcatacaatcaatgcaattaatgcaatgcatgtgagctacggtgatttgttagaagtttactctgtagaacattacaaattacaattaatgcaatcgatgacattataagtggaaaataaatatgcgtctagtcaaggattctttgtattttacatatagcgtgaatctaggtatagaaggagaccttgtattaggacaaccaaaagactgtcctagcatagcatgactatgaacctaggacacatctaacacacaaaggaaatcagaacaataaaaagaggtagtacaacaacgaattacacggtaggttctaggaaaaccgatgaatatatgacacccaactcaatgcaagtgtcggtgcaagatgccaaatatctcatccacagaagtcggatcaaatcgctaaaaaggcatttactcgttcttcaggtgatcctgttcaatagagaaagcatcctcaaggaactcctgctcctccttgaggtggacggccttgagaccggtggcaacggaagcgctaggagcgcgaccggcgtacaggacatggcggcggtggtggtgctcggtagagttgagcagggtttcaagacggggctgggtgtatgaccaggaaccggcgttgagaggctcctcctggcaccagacgatgttcttagcgttggggtagctgtccaagttctccttcagctgagcccaagggaaggggtgcagctgctcaacacgggtgatggcagtgttggtgatcttgttggcctcgcggtgcttgatcaaggcagcgtagacctgtccagagcacaggataacacgctcgatcttctcgggggcgtcgatggcggcggcgtcatcggggatgatccactggaagtgggactcgccttccagggcctcgatgtcagagcgggcaagggggtgacgcagcagagacttggagaagaagatgaccagaggcttgcggaactggcggtggatttggcgacggaggatgtggaacaggttggcagggctggtcatgcaggcgatctgcatattgcagtcctggtgctgacggtccagcttgtcggccgaggggaacacacggggctcctcgttgcaaagctggagccagcgctccatacgtccggaagagtgctcggggccctggccgtcataaccgtgaggcagagacacaaccaggccggaacgctgcagccacttggattcaccagaggcgatgaactgatcaatgatacactgagcgttgttggcgaaatcaccgaactgagcctcccacatcacaagggcgttgggggaggtcaaagagtaaccgtactcgaagccgagactagattgcatgttagaattattattacgcgggggaagtcgacttcaaaaacctaccaaccgtattcgctcagggaggagttagagatgacgaagcttccctggttctcactgacgtggtgaaggggggtgtaagtgctctcagtctcctggtcgtgcaggactgcgtggcgctgggagaaagtaccacgctcaacatcctgaccggagacacggacgtggtagccttcctcaacgagggaaccgaaagcgagagcctcagcagtggcccaatcgatgttcttgccctggtcaacggccttcttgcgtccacccaaaatacgcttgagattgtggtggagcacgaagcccttgggaacaccgtcaccagagatcaggtcaccaatgtgctgtaggttcttggcaggaacagcggtaggcaggtgaggcaggacctcattggccagctccttgggagacttgaagttgttccaagcggaggtcagccactccttaccagtgggctggtagtcatcgctgcgatcgaagctgtcggcgagcattccccagacccacttcttgtgttcatcaatgtcctccttggtgaaggtaccctcggcaatcagcttatcgacgtacttgtcgagctgaggcttctgggcggcaatgcgcttgtacataaggggctgggtgaacgaaggctgatcagtctcgttgtgaccctgcttacggtagcagaccatgtcaatgacaacatcactcttgaactcagcgcgccagtcggcagcgacctggcagatgtagttgacagcctcaacatcgtctgcgttcacgtggaagacaggggcgtcgatggacttggcaatatcggaacagtagggggtggaccgggagtaacggggatcggtggtgaaaccaatctgattgttcacgataaggtggatggtaccaccggtggagtaggcagggagagagtgcattcccatggtctcgtagacaacaccttggccagcaaaggcagcgtcaccgtgcagcagaacacccatggcggtgtcgaagtgagactcgtccttgttgtagtgctggatagcacgggtctttccaagaacaacagggtcctcagcctcgaggtgagaggggttggcaaccagagacagctgcactcgcttaccggagggagtagggcgctcaaagttcatacccaagtggtacttgacatcaccggagccctcatcagaaggctcagtagagccggagaactcgctgaagatggactcgttgggcttgcggacgacgttggacaaaacgttaagacgaccacggtgaggcataccaatgacgatgtccttgataccgtaatcgacgctgcgatcgatcaaggccttcataccgggaaccagggtctcgcaaccctccagaccgaaacgcttgtcgttggggaacttggtagcgaggaatgtctcgaagctggaagaccagatcagacggtcaaggatgcgacgcttgtcgtcaaccgagtagctgtaaggctgggggacctcgaaacgatcacggatccactcgcagggcttgcggtcgggaatgtgaatgtactcgacaccgtaagagccacagtagatcttctcgcaggtggcgatgatctcgcgcagagtcatggtcttgcgggtttcggtgatgaaacggggcaagataccgggtccaagggaaaactcctggtccaaatcacgctcagtgaagccgtagtggtccaactcaagctccttgggcttgtcgtagccaaaggcctcggcctctccgcgaatgccgagagggtcgatcttggccttgtggtgaccacgcgcctggtaggcgcggcagagcaactggaccttcaagtggttggtgacgtcagcgccagcgtggaggcccaggccgggcatttcctggggaacaccaccggtaggggtggggacaagggtagggggaggagtgaaggcctgggagataggcattttgccctcttccatgttcttgaagtacgcctgccatgagatgtgaacactcgaggggtcgttcttccatgccaagtacatctcatcgatgtaattggcagtgctgccagtaaggaaagaatcgttggggtcctgttcacgtaagagcgatcgcgccgtcgcattagtcgaatgcccgttgatatatttgaactaccggggaaaccggatcggattgacaccgatcatgaggattgttgttgcttaccactccttgactaggtccctccgaggaggccgcataggaccgggaaccgttgaaagcacggtcgacaacagccataggccgacgggcggccaggctgaagccggagctttttgacgtattgcgagcagctgtggcgaggtggaatgaacgccggcatgatgaagaggtcgcaccacgcagcatgccgctgttggtggccttcaaggcactgtttctgaacattgcgggattttcttggatcaaggtccaataaagtatttcgaatttagaggagaggagaggggaattgggaagacactagttcgtgtttctgaccaaagagacgtttcagagtcaggttcactgtatgctatcgtgttagcctcgaattgccaggttgtcctgtagtgcgagcaagccggaatacggaggaaaggaagggacgtaagtatacgtacgaattaaatcacaaatcaggtgtcgactagtattgccgtagcacctgtatagacgcgggactcatcagagagctacaacgctctagataagaaaataaagttaggggaagtggtagaagaaagatgaagcgagagaagagcgcaaaaggatgagctgccgagaatgacgggtgtgacggcagctgaagctggtgtgctgagtcagcccgagttacagccgatgcaggagccacctatctagccctttcgaccctttcgaccactttcatacgcagaacctcgggagagccccgaagatgcccactgctttccgtagccggctaaagcttttgggctgttgtccgggaattttcggcccaatggcactggaagtgattgcgattacatacatctccctggcttcccggatttccctgcttttccagcgccaagtctttttctggctgtgagatctggttgggatcggaattcaagctttgtttctatcagattgcgatcgctattaaaattaacgtatgaaccgacagtcgataattcatgaaatcgtcacaccgcacaatggccatatgcagagaaataatagatcgttagagccagatttacggatgtcaggcaccatattacaagacattgagtcgctgaggtccactgttgggaatttcttcagaatctggccgcccggacaacggcgaagtagtacgtggatgactgtcgtcatggaaataaccgacaccattggaaactccctcatcggggctgaaaggcctcgtttcagagaccgttgggcttgcttcggcaccgttgaggctggcgcggtgagagggcgacagcgggtgcggtgggggactacctgcactgctgcgtaggctaccgttgctcccgccccaagccccacggcgtagcttcatgagcgcgcccagggtcatctcatcgtcgagactgcccatgtcaaccagctgcgccagcccggggctcgctagagctgaatttggatgcgtactgccgtgggccttgatggaaatcatagagttccgtgtgctccattcgctccgttcagtgataggggtcaaactgggttcttggaatttcccgcggctgctgtggttccgtgtgatgccttcgacccgtcgcggaccgaagtatccaccgttggttagctcagaggcgccggtgccatctgcgtgtgcgtagaagccgaactcttgaccgtagaagccatcgtcgtcgttctcaagagcttcggcgttagcagcagcaacgatggcatcgtcaaaatacgaatcatcgtcatcgtcgtagaactgatcatcgtagacctgatcatagacgttgtcaaaggccatggcatccgcaggttgcccgacccggctgtcatcagaaatcagacccggttgcgagtctattgtcggcgatatttgacctgtgctgtcttgtccctcggatccttcgctcgtgccgaactggcgctcgatccggctactatatgatgcttcattggctgcgaaagctagagcattgtgcaaaatatctagattttgctctgtgagcacacctccaccatgggcacgaacagggcccatatttggtatcggctcgccgagaggaccacgcttgattgatcctgtgacccggtagtcactagccacactaggcatgtgccgcagtgcttggtctcccatttctgccatggggctttctttccccgaagagtcgtccccatcagggccgtcggggccgtcaggggcgtcaggggccgcactgtccgttggtatgggtgctgcagggggagcgaccggttttctttcgtataaatgactggttacgtcatcgaatatagattcgtcaaatccactatcttggttatcggcagcaagatctccgaaatcgccgtcatcaaaataaagatcatcatcgtcgtcgagaattggagccgcttgctttgcaaccggaacctcgggaaggcttgatgtcgcatcagttctagcagctagggacggctgttcctctggtagatgttgctgggggccatgatctagttgtgtggcctcggatagacgagaggctgagtaagatgggttttggtttgggtatggcagtgcagcagtgagcgggctagcaacagtaagcgggctagcaacaatgggtgacaaccccgggacaacccaggacttggccttgttgatatctcgcggaattgagaaatcatcgaaatcgtcatcggcatctgcattgacgccagggatcctttcttccagaccatccaggtcatccagcatgtcatcatcgaagtcctcgtcgaagtcatcgaaatacccatcctctattttgcgggaggcttcctttgccttgtgcttctcttctagcattctctcttgtgtagatgattccactccgatcatatcgaagctgaatcgggacgcattgctcttgagatgtctcggcaaggccgaggggttgaagggtacattaggaatagtatcttggtcttgagggtgctgaggatgagcatgcgagattgttgtgggtgatattggaggttcctcggcctcatgctcacgctggtccgaaccatctatagttctgtctggtagatgtgaaggcaagttccgcgcaaagaccggcaatgagctatcataatcaggctgcgattggcctgttaaaagtgaagactgaagataccccttattttccacctgtagaacattctggtcctcgaaatgttccttgaagacaggcgaatgatcactgtgccgtttcgcctggtcattccaactggcgccacgtggttgactaggtatttgcggtggtgaagtatccggcccattcagtgtatcctgctggggagccgaaaggttgcggcgaggccgaggcgccgagaagtcatggacaatctttccacgaattctaggatcatagtcatccggcatcggcggaacattccggtttttaattttgagatcttcagcgcgggagctaacgacctgcgaggagcgcctgcgcgcaagaagagacatcggattcaggagatggagcatcgccttgccagacttatgatgtgtctgttctacagacacatcccgatccccagtgcgccggacggtcgtgctaccctccatcttgaaatccctctgtgtcattgtttgtttatccgccggcgaagcgtccggcgaggttctgaaccgaaaatggcccgacgccgttggcgcagtcggcgatcgtttctgcttgccgaatgaacgtcggaagggcgagcttgatttggaattcggctctgcgtctccttgatcggaccgtagacccgtcacagacagttgtgaattattcgactgggctgtaaattgttcttcctcggcgttatcaggactggaatgaggacgacactctttttcaaatgccggcgatggaagagcaagagtaatggaggaggatatcggcgcgacggatgagctgatgttcagcttggaggtatctatgtccagcggcgcctcgttcgaagaggggccatcgggtgaggggtgaccgtcgagggcagtggtgagcgtcggtgtatccggaatctgtggaagttggggagggcttttaatggggcttccattcgctcccttgacaggtgagggcgcggggatcgaagcaggcgacgcggacgaacgtcgatggtctcggcgccagtacgaaaagacagtagatggcggcatggcagttccttgaggccctcacgacgccaggttgagtcgcgcgtatgctcaagcggcgtaatagtccattacagttatcaactgcatatgctaggtgaacaaatacgctgtcatatacagacaactggaccgtggggagatgcaaaacccacccgtgggattccaaggttcgtaaccctcaagcttttgtaagcctattaaactcgattgcacgcaaagaaggggtaatccatagcaaattgcagtaaacatctcgatttttacgtttatttatacaaaagacaaagatcaaagtaacgcgcggctaaaagtgaggttacacccatcctgctgcagtgtctgggcctttctacaatatcgcgtcacattcttgcccctactgtcgtcttcaatgttgactttttgctgagctgggcgcatatggttaaattccccgaaatgtatgcagttattcccctgtaaatcgtacagctaggctccgtagatatccttcgagaaaaataaataaataaaagaatgacacgctcaaacagccatatgctatgctaacggacaaaacataaagcaaaaattaagtgataacgctttcaacgaatgctttgcctccagcgatcgatcacctcagtcttgaccgggccagggggtaccatgtttggagcataccccacgccattcatgcccatcatcgcagggttaataggatacccatattgttgtgccatcgggtatcctacaggtggcggatatcgcatttgtgtcggaaactgttgcatggacatgcgattcccaaactgggacatggtgacaggccgctgattgaaaacatcatacgacgactgacgagaaaggtgggagggacgaccctgtgtaagcgcagccatgctccggcgcattcgcgggttctttggagccgctggagcagcagcggcctcttttctaaggcgactgcgtcgttgtgcgagtgtctcttcctcgatgggaacggggacttcttcgggctctttaggcgcaactccagcccgggtgtcaatttcggccatcaagtcgctggcgaacttactctccgagcgtttatgtcccttcaaccgttgaactcgctcggcgagggtctctacctctgtttcatcctcgctctcggcggccggctcagggacatgcgccgggggctctgcatacattgtaacaggacgttgctccggccgcgggattggttcaccccgcaacctggcacggcgtgaactcagaggctcattttcttcttggtgccgcatcgctagcagccccaaaggtcgatcttcttcgatgttggttttctcggggtacagcatagccaggggaacatcatcgtcatcatcccgtccttcccaggccaaagcgacaggacgttgccgccggttatcactttgcttttgaaccatatcgtccatttctaataaagtggaccgcataccacggaaaggcaccggcacaattgtccgccgtcgatgcttcaactcatgtttccgcaattccaattcggcgatgagcgtattcggtggaccaacataatccataatatccgcgtcgtcagacccctcgtcttcagattcctcactttcgccatcagtgccttccggcccacgctcatggccgtgctcatcatcatttctatctgagtcgtccgagccatgtcgcaaagtggcggggacctcatcttcttctacattattagtgttataagactggccaaagatggcccgcgaaagacggtttgtcttgtgcactgtcgggtcttttgtcagggtcttgcgttttgacgtgttgtagatgaacgcgccgacttgaccagcatatgggtgatcggtgaaagccgaaacgggtgcattcgcagaggcgtccaaaatactctccagcgtagcaaccgcggactgttgtttgacctcgacctggagtgatgtactcggctgatcaaaaaatacactggcacggagatgtggtggcactgtcgatttacgtttatcgttatggctatcgcgtgagtctcctaggacggcgtcgggtagcccaacagttgactttctatcctgagcggcgatggcgcctgcgatttgtgtacgacgcttatcccggtcgatattttccctgcgtgacaacttcggtgggagattcaacatgcgtgggacaggcgcgggataaaacaccatattctcccctgctcgcgggttcttgtaatggtccgggttgcgggcgagcggcggctgctccagagaaacctggcgacctggttccaagggtgtgaaatggacgccatcaaagtcggtgaacagtgtccgcgcctgctggtaggtatcgaatgatgcgaccgaggcccggcgctgcaactccggctctgcgggaactccttgtgggacatattggtcgtaatagtaatcgctctgggtattgaagaggggctgtgccggtgggagatcagggagcccagggaattcatccacttcaggctcctcttcatgtgcaggctccgcaagctgagctagacgcgcccccgatacggagcgctgacgcccgggcgacgcaattgatccatgggcggaggaaattgtggctaccggggagaatgcaccagtccggtggattgaattggacgcggaactgactgagcggcgcttttgctcttgatccatgcgacggatctcgctctcaatgtccgcggaggacgagctcagctgctccgcgctttgctccaaccgcgtgacatttcctttgtaggctccttgtatcgactgcaaatccggggtagggtggctgagaggtacgggaacctcactgcatgcgctgtgaatggggcgctccggagaaggatttcgcgcggtcgtattgagtggtgggatacggaggctgttggctcgctcctcgggggaaggatcggcgtcatagtcatcatcttctactacatcgtagctggcagcagtcatggagcggatcatcgaacctaatcgactgaaagtcgggttctctgtagttttggcagtttctagatggcttccgcccccgatatgatcagtatcgagcggcagctgctcaaaggcatgtttgtgagtgggcgagggacagggcgaagcggaagcggaagagacagaagccacctcgtggtcgagctgagcgatggcgttgtacgccataatataggtcttagtcaccgactacccatccattcagatcgattcaaattaaagaagatttcaggatcaaaggaactcggaataccagggataccagacaaagaaacgaagccagaagagatgtagggaaagaaacgaaaaaccaggaaattgggctgggggatagcggctaattttggaagtttgctgtcgtacaataatttgccctggaatgccaactgagctagtaactccatgctaataatatatcgatgcaatttcctcctaaaagtcccccaaaagcaaggaatccaaagccactaaggggcctctgcgtccgtgtcttagaccagtcaacacgttctgcgcgccgagtcaggcggattcgactctccactctgctctagaggtcttggcgtttccctatatctatataaggagtccggaatactcggtataagaagtataaggagtgtctcaggcaaccccttaaccccccgccattcctctacttcgctgcctttctacaggcttcccgggaacatgcatcaaaaggaaacccaaagaggcaatcccgaggtgtatctgcatctgagctagaggacttgacaaccccggaccaatcagaccatcaacagatatcgcggcctcaacttttttccatgagttaaattgcgagttaaattgctttcgaggtttaccttgctaggtctgaccagtgagaatacatcgattagggttggagactcgggtcgcgtgacctgtcaagttcaatggctccaatccaactggcaccggtcacgtgctgatagcattatcttatcgcatacctacctcatacatcgtctatcctgtcctctttcctatcaccttgtcaatcacttatgagatctgcatcttttccaatcaactactcatcatgccaagcagggacaggagcagatggcgcaatgtccatttctacaacgcgtccaacgacctcctaggaggtttctaccaagctggttccataaccgacgctaacctgatctggattctccggagcgtgttgctagttcaggcggagaatctcacgataaagcatcgggcctccgatcgaattatcacaccatcaaataactccgttgtccctggcgactatgtcatttcctgtgatggtaagacttcacgtatcactagcatacggttataattaccaccgttcgactaggaactatcagggtaacggacgaaccgtggtttgctcgcgtgatcagcttttctgaatcgggtcgagaagattcatttcgtactgaggtccgccagcgagacgggagatgtgttatttccggcgatatcaaccttcttgagccttgggatatatgggatggtctacaagctgcccatgtattccccctggaaaaggagaatctatggactcagtataacttcgggcgttggatcacgaatatggaccatacgacaggagtttcgaagattaactctgttcaaaacggtttacttatgggtgcgacactacacggttgtttttatcagtatatgttctctatcaaccctgatgtacgtttcctaatgaccaaatccctacgcagaataagagacaggacagatataagattgtcacatttgcaccagattcctacagaatcaatggaaaagtccttgacccgatctgccggaatccaaacgacctaaaccatgtcgcggacgagctcctaagatggcactttcggcaaagcgtgctcgctaatatgaggggggccggggagccgatattcgagtcggacttcccccctgggacagatcaaatagcgacgttacgagacgaaccatacggcaaggagaggttgggaatggagtttgaactcagactcggacctagagccaaagaagaagaagagtcgacatattaatagggacatcaacaactactagactcgaccgtgatgtagcttggttaagcgcaatgaggaggtttttgtatcactaccctgaaatagtgctaattcagcatattattagtgctttcttcaagtcccactaggtgagggttcgacgataatgttgtaacttgtggtctactactcctagtgaacgactttgctttcgccctgtttgtaggcaggccgtgtcggtacccctgctgcatccgttgcagcataaattactctttcttcttttttgcaaagatcaagaagttctcgcttccctgttcttctggtgggggcagtagaatgtggagaattgaaatatggtacgagctcttgatacccaaaggatagaatatacatattctaggacagcgtgttcatcccggctgtctgccaagcaatctcgtgttttcatcctcaattcgccgtttgtttcgccgatcgcccatgtggctcgtatacatgtggctcgtatagctcgaggccaaggtgaagaaacgggactatttttggtaacatatctggatctttcagacctcacgtcgtattcgccccggacttttcatacagaccatcgttttagccccagagtacggttgatattcagcatcttcatcgtattacgagaaaatgaaacgaagaaggcctaattttaacaaattctccgcggcgctcagttccacgttgatcagcacctggtaaagatccacgcatcagtcaaggtataagtatcctagcccggcctgatgcacaatattctggttacaaattcaaagacattcaaagtttcatcgtctctcgtatcaattcaaagctctatcctcgaacgcatcattgaaaggaaacgaagtcctcagaaaaacacgcaggatttgcctactttcctaactcgccattatgcgattcacaaacttggctctgaccctagctgcggctttctctgttgccaatgcgtacgccatcactgccagtgttgccaactgccgtactggtccctcgacgagcaatgcagttgtcacgacatacaaaaaaggtgccgatgtcaagatcacatgccagacttatggcgaaaacattcagggaaactctatctgggacaagacatctgacggctgctacgttgccgactactatgtgaagaccggctcaaacagcatggtcaccaaggactgtaacggtggcagctctggcaccggcagctcttcctacaagggcaagatcagtcgcaaggagatcatttcccgcggtcagttctgggtctcccgccacatcccatactccatgaacgccgaatacccggacccccaaggccgcaaataccgcacagactgctcgggcttcgtcagcatggctttccatgcgtatgcgccaggatataacaccgtgagcctcccggatattgccaagtccatctcgtggagcgacctccggcctggtgactttgttggaaccctaggcgctggtactggcggtgctgctggccatgtcactctgttcacttcgtgggccgacagttccaagaaggagtacaatacgcttgagtgccgcggtacgtacggctgcgttgcgtacaggcgccctgttggttggaaggttggaagtttcacggccaagccctacaggtacatccacgttgtggactaagctggagcttgtagcattttggggttgaacggtgatgtaaccaattttggtgcgtgtataagtgcttgcgacggctgcggtggttgggtaagcggagggatatgaatagcttcagatgaatttgtgagcagatcagctaggcagaaaacgaagaaaagatgaagttgatatactcctgtctgttactatcttaaaggatcggttggtagtacttgctgttcttgcctaggaaggagaactttccttcctaccgcgtaggcgagcgtaagcgagtaaatcctatttgcatggtttgatcgaagacgcacaaatgggtttccatttttcctctcttcgtcctttttattctcactttttgttccgatataacctggccaataacactgtatggcaggacaatgctaccgtagaatctggacaggtccagacaaaaagttgttaggaacgtactcttcaaagcaatgatgatgattctttaatcaaatctatgtgtcctcggctacgaagatttacacccctcatgtattccgtgggacttgtcaaatggcaatgagagccacgacttcaggaacgtccacgggaacgcccggtttgatatctgatgcagacctacttggacctcataacaatggtaatgttatgatccctgtggtaggtgaagcagcatgtgctacgggtccctctgcctacactgtctcgtgggctacggtgagatggtggtcagagagatggggaggagagaagaagaagagaagaaaaatggggggaagggtccttttatacccccaacccacgtgccttcctaacgtgtgccaggtccctcgtacattccctgtcaatgtcaatgtcacatgcattgtgccttatttatttgccttctttgtttacacgcggtccttcgcgaggcattaccgtttcccaacttgaatttctacttccagtgctctgattgtcgtacttgatctttatttcatccacataacttgacccgtagctttcatagcttgaatgaaccagaaatcttccaatcatctcccaaatcggttcctgtcttctatggaggtacaacgcccggataaagatatatgtctatggctcgattatagtaatggtctatcagctctttctggggtacttcttcacgtgctatccttgagcatataggagaagacaatccttttcataagcgcttcatctccattgctagcagttttacttcggatactccaagacaacctttcgagtcttgatgtggatcaagacctcagggatctagtatgcaaaatgacaaacctagatctcaagaaaaggatcaccgcaatgcaggcacttcagcaccgctggttcaggtcgatttaagaaaactcgcagtataacctgggataagattgtgttcaattcttcaacattcggaactatatatggcaaatttcctaattctggtgtgctagtgacacgaaagtactccgtaccaaaaacaacaactgttgaaacacgctaatcgggttgcagcaatacaatttgtttcaaatcgtcacaatgttgtccatcctgatgctaacgacgcctggtctgtagtatctgcaggggactctgcactaaggcaaacatgggcagaggtagaggtgccatcagtttagcacccggcggaagtgccaagggtcgtcgggaaatattatgccggtttcgctggaaattgactgcaattacgctttattctttaagatagcttaacattcacattctcatccggggcactgaggcatacttcgagcaagcattccacgacagggcgcatatcctctttgctccttggcgagataaagagccaggggtatcgatcatgagatgtccgctatatctgtgatctgaatttagcagctgctgcagctgctttctctaatggcgatgtttacggcataaagggaaaatctaaaggtggtatttcgcgcagtctgaggctcttctaagaaaccgccgagtcctgtggaatattcgggttgaaggcacggtttgaacaacgtagtcaatttatgagaagtgagggggattgaagcgaaagtcgggcagtcatacatgattgtatcacatgactaaaacgggtgcacgctcactgccacaccgagacttcatcgaatagagactcattttagactcatttatagttaggcatggaaagtgagtgctacggtggcgggctaagacaacacggctacagtgccaacaatgattttcactcaacgataaatcgcacaagtcaggtacattttatggtatactaataccattggccagatcattcatttataggctgcagcctcaaaagatatataaaagacttgtactctagtcgtatacaggaaatagcaaaattagaggtggcggtgacacactagcagttaaagaccgcagagccttaactcttgaccaacggtactccaggatggggccggcctaacatccgccaattaggcggcgtctacataaaaacccaatatctgtttccttggaatctatccatttccccggtaaagttatcatagggggtttggtggatcgacggtgacgaaagagtggagcttggggggttggaatcaagctttgacatcttgaagggtttaaaaaccattgggacatcttggactgatagaattgtacattcttttctccatattccctcagcaaggtgcttttttttattgttattgttgtgatgggaaactcgagggaacctggccgggatggcggagtcaagggtatgatacaggtttgaagggattgctgcgagatagcaataatgctgatacaacgacagatgctgtggatgctcccgaatatgagcaaccagaaggcaccgaagaagaagcaagcaagaatgaaggcatgggcaaaaacccatcatatagtttggctggctctggcgcacagaatccaaacaacaaccaaggatatacagatgaagagtaccagaagtacgcttctcaatataacaaacaagatgatggcccgacctggagcttggctcatccactgccccatatagtccggcccggcatgcgtcacggcgccttgccagaggaccgaaaagaggatcgaaaagaggatagagacggcacgacagagaaccagcaggattcagcgcacgaggaggaagttcgcaaacagcagtcgtcagaaaatcgaacgaagaaggtcaacgaccccaaagaagacggctttttcaatacatggtcgaaaattcgccaccaacttcgtgagccgctggccgaatggctcggagtaagttttatcgatatggctcaaaaatacaatcaatcaagcagtctgctaacaagtgtctcgcacagacaactatggcaatgacaattggtctttgcgcgaccttatcaaacttcacttcctccggacaagccggatcataccctgcccaaagtctcgcctggggctttggattcatggtcgctatctacaccaccggaggtatgtctggtggtcatttaaacccagccatctcaatctcgctgtctgtattccgtggattccccgcgcggcgatgcgtgatctacattgccgcgcaactcctcggagctatcaccgcagggggaatatcatacgcgatctaccatgacgccattgttgaagtcgccagattggcgaacgtgcctcagaatgcaagtgtcgcctcgcaggctctcctcacgttaccgaaaccatttgtccgtcctgcgactgcattcttcaccgagtttgtcggcagcgcaatattacttggctcgattctagctctgggggatgacactaatgcgcccccgggagcaggaatgcaggcatttattattgggatcattatctcgattgtgatccttgcacttgggtataataccggagggtatgtgtcctatttctaaactcccgattctaagtgctttcgaagataactaatgatctgatagttgtttcaatggcgcacgagactttggcccacggcttgttgccctcatggctggatggggtggcaatatcttccgagaataccatgcatggtgggtttggggaccatggatcgcagacatcaccggtggattgtttggcgcattgatctatgatatggctatctttaccggtggtgagagtccagtcaactatcccccgcggagacgaaagcgggcataccgtgtgagagccttgaattttcggaagaagcttcgtattgggagaaaaaagctgcccgatcttgaacgttctgttgcagctactgagcaatgagctatgttcttctatctatgcataattattaattagtatagttactggttatagatttaaaagtgaaattactgggcctaagaatcttaggttgcttcatgtacatatattacagaataattgaggatatagctattcttcactcgctcttctctctgcaaccgccgtctccaaaccagctgttacctcgtacgcagcccttgggactggccggcaaatatgaccggaacaggccaggctggagttggccaagcggagtgcgtgaaggaacctaggcacgtgatatataccacagaagataaagcagtgttagaatttcaatagtcttcattgattcactgtccctcattgtgtcttttacaatgtctccaagagtattttatggagtctcgggactttccggtctacacagtcatctcggaagatcccgaatgtagatgtccctgcgatagcgattatttgaatcatgcggggtcgagcttgagaatataagaaatccctttttctgaattgcttcttaggttctgcaacacaatatcattttgcctcgatatttatttccctttattttgctttgattgtctcaaagtaaccatgactatcggaagaaagccgcgcgttgtttccctcggggagcctgcattcgtgggcagtgaatatcttactcaattcaagaccgaatttgactattccgtcctccctgcaacaaatcgcgaggaagcccaggtattgctacccaaagacatcaacgaaaatggaccgatagacgcgttcatcgttcgcatgggtacgccaccctacgagccactcgatcaggatttttttcgagcactagcaccggggtgtaagattatcacttctgctagtgccggatacaacgagttcgacgtggactggatgacaaaccaggaaattgtgttttgtaatactgtgaatgccgtcgctgaggctacagcagacatggctatatttctgatacttgctgttctgaggaacactacaaacgccgagcggagtgcacggagcgggatgtggaggaagggcgcaaacctggttcctacttgtgatccgtcgggattgacacttggtattgtcggtatgggtgctattggaaaggtgaatagtccgaagtccattgactcggagcgctgctgacttccttctcagtacctcgccaagaaagccgcggtcttcaatatgaagatcaagtactacaatcgacaccaactaccggcctccgaagaagcagcgtacggtgcaacatattgccagtctctacatgagcttctgcgcgaatcagatgtcgtctccttgaattgccctctgaatgcggcaaccacgaatctaatcagcgaagccgaattctccgctatgaaagacggtgtattcctcattaacacggctagaggagcagtcatcgacgaaaaggctctcattgcggcacttgagtcaggcaaggtacagcgggctggacttgatgtttttgtgaacgagccgagtccgaatccctactttttacaaagtgataaaatcgttgtgcagccacatttgggtggtttgactgagaaggcattccaaaaagccgagagagaatgctttgagaacatccgtgcttttttcaagactgggaaggcaaactcgccagtgaatatcaaagtccaaaccccctgagggtgatagactggttcagtgagagatatcagctcagttcagtgcttagctagtagtaactctaaacaggaatataagattattatctactcagccctccttatccgaaacaaagtgtcaatctatagaaatagctctccttcgctatcgttcattggacttcggattctcccggtatgttatcaggggcggtttctcccgattcgcatttgagaatattcgatctgaccacagattgggttagacttagtttcgcattgcttaaagtgcgcgcaagtcgatccttatgtgggaaatgtggggaatgcctggcaacatccgtactccgtaattgtaagtacgcgacaatgaggataggggcgaactctgatagaccgtcaataatgcagttatggacttcaaggtgtgaaagaatgattgaggggtaaatgttagatcaagtcattggtcacgttatctcaaccgttttatctcccccgcgatattgtcaaatcaacattgtgtctcattccagcattttgaatcatgagacacgcaccaaagcgaccaagagtcgggaagcggacgatactggcttgtatcgaatgcaagcgcaagaaactaaaggtcagggtcgcccgaagagtgaaagagatacgtaggctgacagatgattagtgcaatgggcaaacgccgaaatgtaaccattgcctgaaaaatcaacatggtacgtcaattactcttttgggttggtggctttatctgatgtggcgcagaatgcctcgtggaagaccctgccacagggctgcgtcgcccgcgtgactacatgcagtcgcttgaatcgcgtgtagtttatctggaagcgcttctccgagaatcacgtccagatatacctttgaatggagataatcagcatgagctcagggatatcgagtctaatactccgtttgttccaacaacctcggcccaggcaccggaagctccaacctccagccaattacaggactcgccgggggcatacacgagtccttcctatatgcaagaagcatcatcatcatcatcaattccaaaagagcacgccgggcaggtcgaccatctctcttcggaagttgccctactgtgtctcaatgctgcgggtggtgagccccactatttcggtccttcatcggcggtcttattctcgaggatcattagtgcaacaatgggtctcaaaagcgagaaatcgtcatcgtcgccgcgtacttttgaaggctcggaaagaagccatcctaatgcacggcctgatagagtaccaggactaccatcaccaagtgttgcggctaatctatcgcgggcttatttcgataatattcaccctcagtatccttttctccaccgaccaacattctgcaaatgggagctggatgtttgcaaatctagccagtcggtacacaatcctgccgccggagaggttccactatttttcgtccttatggtatggccacctccagtggatttaagatatgatctgacgatattgacttatcacaaaggtctatgcaacaggctcccttgtattgaatcaaagtcagcacggtgccgcagcggtatgttctacttgaccacttgcgtattcttgattgctaacgctatcagatgtactattccatggccttggattacctcccctcagtccttgcacttaataatctggaatcaatccaaagcatactatgttgcgctgtgtactcaatcagatcacctactggggccagtctttggtattttcttcccctatccttgttccaactcaaactataacgtcagtaataggaaaatatcaggcatggccattcgtcactgtattgagctaggataccacagaagcgcagaaagatatcgcaaacatgttgatcccttgacaaaggaaatgtctagaaggtgcttttgggtcgcatacgacattgatcgtgttgcagcttttaccctcggtcggccaatgggtatcccggatgagttgatcgatgcagaggtatgatataatctgtctaataccttacttcgatcttttaacctcctataatagcttcctatggatattgaagacgagaatattactcccagtggcctgttggcgaacccccgtgctaccggtaaccaggtgccaacaatcatgacaggcactcttcatgttatcaagttgaggaaactatgggcaaaattccatgccactctctattcacctcaattacaatacgccagtacgggtagccaatttgccactgttgacactctgcgccaagaattggaagaatggcatgcatcagctcccacacacctggactattcatcctctcatcctttatcggtgtttgcatcaaatgaatggttccaaattgcctacaatcattcaattctgattctttatcgctcacatatcactagaattctgggtgaacgacagggatctggcccaaacgagtcgaacagcaccgacttcattgaagaggaagaggacctccaaagagcattcgaaaattgctcccgctgtgctcgtgaaatatgcgtgctgtatcgtcggctataccagaaatcaagtgttcaattcacttggggaagtctccatattctgttccttggcgggttgacatatttgtattgtctctggcggtcatggcgaatacgccagcagactaagcagagcgagatattaaagacatgtatggcctgcacaacagtcttggtcattatagctgagcggtggaacttggccacatcgtatcgcgatatcttcgaaacactctctgagaaaaccatcaacatgatctgcggaaatgataagcttgctggaccagcccctccacagtcacaatggactgccccttatgacaatctcctttccccaagagactggagtttgggctttgatgatttatccatgcctcaaggttccgactggtttattcaagagtttttacaacagttcccagaatcttaacctgatgaaaccgaactaagagtcgaattgcatgtactcctccaggatttaaaggccgctcagttatactcagtgaatgaaaggcggcaaggtgtgggcaaagctctcgtgcggcctaaaatatattttgaacgtacgaggtcgtctagtatgctatgaccatcgatacacgtcatagaaatcgttcgaattagtttagtagtgtggactaccatagttctgcgatccaaattaagcggcggctagctagggtctagggtagggacttataaattcttccgttgaaacctttcctttctttctcctcaaattctatcttctttctgatactaaagcttaccatacaagaatcgttcaatcgtcactaaaatgtctgagctatctgttgaaggccaagagtcgaaggcagtcccctgctaccacgaccaccctccgcaatacgactcatactatggaagccaagacttactcacctctatcattgagaacgagcatactgtccggaaattagccaaacggatggatgagttgaacacaaagataacggagatagccaacataagagaggagctggagaagaaaacattcctggaaactccagcttcgaatcttaccactgctgaagattttgaggagttaagcggggcattcacagagatagcacagataatgaccgggctgtcaaatgcttgcaaagagcgcgccgttcacaacaccgatctctataaggccatcggaaatctcaccgataacgagctcgagcggacttatgattctttaaagcgagacccagaccggcagatccgacatgagctggctcaggaccacaaagaccgcagcgacagagattcaggacacaatttacaatgctcttcgacgaccaatccagtagagcgagctggcaattgcacatacaactcttgcagccggttcgccgagcccttagcaacgatggacaatatcaatgagaaacttccatccgatacggccaatatctcgaaagtggccgatgatactaccgcaaagtcacccgtgagtttttggaagaaatttttcagacgttcagctcggccttaatagtgaagtggaatgagggtttctgaaaggatcagattatgagatgactgatggatcttggtctttatcttgtctggtaccaacttgaacgattcatgcggatgtatatactgccgatgattaggttgtttctgtatggctgaatcaaatttgttctacaacctttcacacatcttgagatacggtcgaaatgtctaatactcaagacttggacaaacattttcttttcctagcttatcatgatcacaaatcaatgaggtctaaaagaatctagctcccgcggacaaagagcctacagtgagcagtgaaatatatgtccgagagaaaagtcaaggtaccctaaggcaccgacggttgaatggtatatatttcataatcacgtccgaagagggcttgtggaatccaaaaccaacagtcaaacacaggaaaaataaaacaacaaagaaaagacaacaatcaaacagtagacctccacctcacatctacacccagtttttcctttcatctcacctcactgaggttcccggagagaagcaaaaacagtcaaaaagccccagaggaatgccgcgaaagcacccttgatcgtacatccgttttcattcatctcacctcgctgaggttctcgaagagaagaaatcggacaaaacaacagaggaacgccgtcggtaccataacccctcatgcgggggcctcgccgagctgcttcaaaccatgggcaatggtgcgcccaacactggccaatgagttgctcgtggcggcgggatctttcagccttataacaagattgcccatgaacgaggggctctttggtgagggagccgagccaggcgttgcgggctttctgggggtcgcgggcccaggcgtcacgggggccactggggtcccgttagctgcaggcagggccaggtcggtatcgtcgggatgtcctcggccgcgcgggccggattcagattttggaggctatgccgcgagatgtcagccgatgtacgaagaagcccccggaggtgtttcaagaatcgagagctgccatgagagctcgcacgagagcttgcacgagagcgaacaggacatgttctacagggatcatggtcttnnnnnnnnnnnnnnnnnnnnnnnnnnnnnnnnnnnnnnnnnnnnnnnnnnnnnnnnnnnnnnnnnnnnnnnnnnnnnnnnnnnnnnnnnnnnnnnnnnnnnnnnnnnnnnnnnnnnnnnnnnnnnnnnnnnnnnnnnnnnnnnnnnngcgaggggacgacagatgtcacacgcaggaaagtggtggttatcatgatggtttcagtgattacctccatgatgagaattttgttgagaggaaaaacatcgagggcacgggaggaacatgatgtactctcgactaaatggttcgtgcctgccgaatttgtagtttcccattgcacgagcacagcttagtctctatctctctccctcaaagttaagaaagaagattgctgaatctgatgtagttgtgttggaccgttgcacacactgccacttcgttcggcatggtaataagcccacttgctttgacgatgtgtctgatgtgtgtagagtgatgatgtccattgtgatggtgtgtgtgagaggaagagaagagaggaagagggaaagagggaaaagccaataaattgtctgcgtagcttcccatgattagagtagttactcagaggatagtaaaatcggataaggatcgagtttaggtcaggccctaaaagaggagtctcgaatatagtgcttgcaaacacttacagcttcgtataatgctctgggagacaccataggcattcgaagctccgagaaggattgtgctccccgccagtagctgctattatagtgatggttaagatcggggtggtagcctatctcccggagaaataagcggtagtaaggagagacatataagcatgatacttaaaaccttggcaaattctactgtctaataatagggaatggttgggtaggccgtgggccgtggcaaaaagcaaggaggaggagtggcataatatacttgatactagatttatggcttatatactatcttttcaggtatctttttagatgtctttttaggtatctctaaagaacccttcagcccgatactattattttttcgcttttaaattcgtactttccacctctttggtacaccatctcacacgcgcaaagatcctctaatatacatcttcggccgcatcttttcctacaataggatcaagatacctgtaccccttgactagaaacttgcgatatagtctttgcttaattaagcataaccaacttatttttaacgccgagactccaaagtcacgtcataggtggtagaatagtgagtcgctatagcatttatactccattctttctagtagattatactacctagggcctatagttcccacgtgactgcatcgagatccccgataaggtcacgtatatcactgtataatcttacacccgacttgtgatcaaggcggtacgtttacgattaaggcgatcaccgttccccgagcaaataaggttatttcaacccgccgtatatcagacaaataacaaccaagcatttttccaccgagacaatccatatactcttccctgttgctaattgatgtcttggcaatttccgactctccaaaaacgggaccattcctgcttacgcgctaatctgctcaaaccaacgcaaggctgtggccaggtcattccagcatttgcccatgtatataaaagacaagatcacccattctagaaaatagatagttactagaggggctgtatatactccggattcctgattgcgaaaccacaaacgacatgtccggtatgacccccacagttccacttccagcatatagtctccatattaacagattgtgtattcagaacctcaagataaacccgcccctctccgcgtgggcgtagtgctgttcccaggcttccaagccctggacgtattcggcccagtggactgcatcaacgtcctctcctggagccacagcgtgacattggcacttctctcctcaaccctggagccagtgacaacaaagtcaccgttatccgccaacgctgtaagccaaagcgtcgtgccgacccacacgttcgcaacagcaccgtctctggatctgcttctcgtccctggtggtctgggcgcgcgcggctcgagcccagaaatcgaggaagcaatctcgtatatccgaaacgtgtatccccagctacgctatcttattacggtgtgtactggctccgggcttgcggcgcgagctggggttctagatgggaaacgagccacgacgaataagagggcgtgggcggagatcacggggctggcggtggatgttgagtgggttcctcgggcgagatgggttgttgatggtaaggtttggtcttcctcgggggttagtgctggtattgatgttactcttgcttggattgaggaggtctatgggagtgaggtggcggggaagatcgcgaatagtatggaatatactcgacatgaggatcctagtcatgatccatttgctgaactgtatgggctttgagggaactatgtgcctacttttgtgttttgtgtggagggtctccactcagttggggaaatgtatacagaaatatatcttctatgctgagacggtgtggcgtgtgcgcagtgccacgtagcgacacgcaaaattgcattgaccattttttagtcttatgtgggctttctgtgatcctttcaagggtttcatgtaaatgtaaaagggcctgtggcataacacgaggctcgccgtagagtatgaagcacatataaggaggcgacgatttggaagtgcccatttcccagataagcaactcggcctttccccccccgattttctagtgaacattgaattctcatagcccttcaaagatcagtagttgcggatgccatggatccgtttctccaccgatttcccatttcgcgggcacgtgatcgcgcgccgttatcgacgcgcctcaatctcacaactttgcgatccgaacatgaatatcccgacgtgtcatcatgtcttactatgatattgactccatcttgacggatgcacaggtgagttagtcgcgacccgcaaaaatgaaccattactaacatcgacccagaaactaccatgtacatttgagctcgaagtacccggactgggtattctagagggcaacgcgggcgaagatgcgagtgctctatttttcactatccggcgacacagattactgaccgatgcacagatcaaagccggaacccggatcgaccttccactatggctaggtgaaatgctctcgatcgggtaaggttcttacctagaagaccagcgtggagtttgttcttatttttaacatggtatttatggctgcagagcgcgtctaggaacggcccgcttggttacgctcgacatgcccgaggcgctctcggagcgggtgatgaacgcactgaaggccgatccccgcacagttgacttgcgcgctttagcaccgcatttctacaaccttagcgagcggattcttgaactcttcgaggaggaagagatggtcgatgttctcagtgatgtaggtggcattatttccgcgactattggttgagctaggattaacaggctcttagacattcaaaaaacgagcggctgagattgccgaccatgcacgcaactcgcgtggtgcggttggtggcggagttgagttccttcgtggactggatgagactgagcgacaatgtaggttatgattgtccttatttggatgggggatggccgctaacagatatggttcaatagtgttccgggctgctcatgaccgggccaaggacatgcggatctggtcaggagaggcgaaacgtaagtaatagtgtttaatagcgagacatttctctgggctctgagctgtgctcgctcaggaaagtgatacattctatgatcgatcggataggtatatgacagagtatgaaggatatgagatggctgggtggagtcgcatagtttaatgttgagacgttgacttccgaaggcgacggagtggagccccgacccgtcgaaagggaaatgtttatttttgtatagccgacctctgggattgaaatattgtttctcctttgtttccgtataggatgattgatatatacacccaagacacacacatcctgccctctatcccaacaccaaatccaacattcaggagaaaccccgcgcaagggccaggtgagacgcgccccacggccccggtccgattggccgtcgacgggcgagagagacaccaccggagtgatcgtcgcgttaaggagccgattgactggaatctagcctcggggctggaaaaagagaaaaaactatttagaaatcaccagatggggatctgatgtttcttccattcctggcctctttccattcttcctctcataacaataacatctacaacatacacaaacattcaaatctagtgcggggccctttcctctctttggagatcgactcgtcacaactcgttggtcacttcaccctcgcgtttgactgatcccaagtcccgctcctcccttgagttggcagcctgagacccctctatgccttgatttgggtctattgcctcgataaacctaccttgcactccacaggttcgattccagcctctgattgctccccacctgcaactcatctgcatccctcgcatcgacggcctgcgtgttacccaccggcgtccaatcaccgtccatatccgagggtccatctattaatcctccgatgcgggtggtggattgtgcaggcaattgttactgtggtgtctcctgattgactaggatattgcacggctgcatccaaacaggggaacggggggcttgacggcacgtcaattatgcgcgttcgctaaaacagtatgccggcagtcattatggatgagaaaacccaaagaaggagctcggccgctggtcagcttgctccttcaaacactcgaagtcccgtatatcatcccagcactgcgcccaaacgcagtgtttcctctaaagaccactcctctagtacgtggcttctaaacttgcttgaattgagttccaacactcagccttaatttaatcggagctgacattgcttcttcttcaagacttatcagaccgtcctcaacatccatcgctttctcgcgtcaaaggtcgatcgaatatgtttactccaccaagaatgagtccagaggtctcatggctaggagaccaatcgcctgttcaacggggcgcaagaaccccagtccgctcatccacatccggtatgtctttcaattgccatcgaccttggctgtagagcacaactgatgattcgtggctagaaacccccgaacctagcacccctactctagtaaaccctgcctcggctctcctgcaggatctactgaaagaagaacgcgcgcaccgaagctcccgaggaaccatatcggaggactttaaagaaaatgctcctctcactccggagaacactcgaacccaggaagaacctacctccgagaaagcccgcaaagcaaacgatgtcttctccgctggccagagaaaaccaaaagagatgggcatgcgggaaatggaccaagtaagttcataagacgcaatccctgtgcactagctgactcgtctaagtatgtctccaaaatgaacaagctgaatttcgatttgaagctcgaggtcttccaccgcacacaacagttggctatgtacgagaaaaagctggaaagaatggcggagatggaagaacaactagcgcacatggatgatttgatggcggaggtggaggagctacgaaccaccgagaaagagaaccagaccctacgtgaatctaacgagcaactccgcaacgaccttgacaagcgagacctggcggtgactgaagccgtcgagctcatctgccagttggaatcgaaacttgacctgctggagaacggccggggctccaggctgtctatgtcgcgccccatgaccgccgatggctctgaggccttagctaaagcccaggccatgatcgagatcccggagagaacctcttccaagcgaaatgcaagtgtcttgaacgtagctcagaaccagtcatcttccgagctacgcagactctcgaaagcaccctccttcctacgagcagataacaaaagtactgccactttgcggagcctttatgctcctgaagaagaaacccagtcgcgctctgcaagaactgaactttcgaaatccgagagcttccacacaaacaacgagatgatggagccggaatcaccgagactgagcgtcctgagtgaatgcagcgagctgaatgcattcgacacgcctatgatgtggcaagaatttgatcagctggagatcccggtccggagaccgtcgtcggtcgcaggcagcttggatagctatgtcactccccgagagcgggaagaaagcagaaaagacaagattgaccggtggatgcagtcccgcgaagacgtaagcgagaccattatcaacagacgcaggaaccgagtatcatccgatgctaccaaggcgagcgttgccagtttctcaccagatctatacgcttctaaacctcgtggacgcggacgactggacggatctctcttcggaggcatccaccttcctcccacccccgacactatgagcacggcatatgctatcggtgcaaaccgatcgaatgggtccgatgggagtattgcagcccggaagggctcccagactgaggatttgttcttccctggcagacgacttaatcgcccacgttctgctggagagatggcctgtccctacagctatggcagtgacattgacgacagcatgcaaaacaactgcaatgatactccgcgcctaggagtcgctgatgagtctcgcactatcctgccctccttcaacacagtttcctccaaagccagcgcgctccttgggcccggaagccccgacaaccctgttattgaaacctttggggatttataccacgccagtgcaaacgaaggatccactcaaacaatcaaacgcgtccgtagccccgccaaagctaagaccccagagccgcacagtgacagcgactcttcaccaccactcacacctcaagactgggttgccgctgcaaagcatccccggtctcgcaggcccagaccgcgcgacacccgccacgaaatccaacccacagatctatcaccaggcactgtcatcagtccagcatttgaagacgacagcagcctcgcttcaggttcaagcgagctcgaaatcaccggtatcccaactctagatatgagcactctggatatactagcgcgaaacctcgaacccacccagccaggccccaaagtcgaagccaagcacgagcatcgtcgacgtctcagcttcctacccccattcttcaaccgctcgagctccaacgcccgccaactccaaggctccccagtcttaaacgacttcgaagacgacttcgacgacggcgctccatccccagtaatccccaaaaccaggacaacaggcggcgcgccccgaagaccagcatcccaaataatcaccgctccaaccgagctatacccctccaaccccccaatccacatcgaagaaccgcccgcggccttcagacgcggattcccgcaatcagcaacaatgtccacactagcggaccacggcaccgaaaccctcgcgcgcccctcctcatcccaaggcccggaacacaagcgacgcagctcgctaggaatattcggctggatgaagagcaaacgctctgattccgggcccgggacggagaaattcacggactccacgtccaaagagaaccgggcttcctcgcggctagcttacgaaacgactcatggacttggaattcctcatggaaacacggactccatggagactcatgtcagacaccactccgagatgggtattcagtatgatgactatgcgagacggcctcgttatatgggccgtcgtacacgcaggggctgagtctctctcgaagctgtcatcacggccttactcttcgttctttattttcttacttcgtctctttgcctcggtctctctttgtctctgttttgcttcttcttccatttgtacttcatgatacccggccctgtataaacagtagcgtggctacattcctttgcatttcttttactcttcatttgaaacgccatggtgtattatgagatctctttgctttatcttatgttgttactttaacgtatatgaatcacgactatagccttcttcatctttcacgatttattcatcctgtcggcagggtctactgagatgtgttttatagtctcaccttactctacgtaatgatagttcgaaatgaacgaagattcaagaagtcaagtaataattcaatttcctttctcgtcacacgaggacaactagttgatacgaagtgacgggcgcaagctccggcctccatcacttcgtatcaactagttgcccgcgcagactcgaacgcccgcccccacgggtctccccaattctcttccttctcatcgctagacgatgggagcctaaggcccccggcccttcacaccgggcgcgacaacaagggttccgtacacatcagggtttcccctctagtaagagatgggtattagcaagtgcaccgatagagatggaagcagggatatgagaagtgacttacgatgtgggtctgcgcgaggtgccgccgcagattggaggccatgagtcttggcctccccaccttgttgaattctgcgcagtacgggcactggtacgcgcagggagcgatgatctaacgaagtaaaatgaaacgtgttagtgatgaaggatgaaaaagaaaggaaggaaggaagtgaagtgagaatttaggaagggagggtataggcttggggtggatgggatgggatgggatgagataggatggatgggatggaatacgtaccagctccgcgttgttcagaggccactgcgcccgcgggccgtggcagtcgcagagcagcttggcggtctctctgatatgtgcgatattaattagcttggatcaaatgaaagcacgtagacaggtgacatggcgaagatggaacgaaacttacgcgaaggcgtcaggagggtggctgctgtcgcgcgccttccagcggctgccctgggtagggctggtgcttgcagcctgggctgcagcggcagcagtgcttgtgccctgggtagtgccagtaccctgggtggtggcagtggcctggtcagtgccagtagccgggacagtgctggcagcagggacagtgctggcagcaggagcagtgttggtgccctggtcagtgctggtggcggtgttagcagagtttaggagaagaacagggtcaataagctccataaagcgcctctgctcagagggatcgaggtcgtaccaagagccttggtgattaggcattgtggcagatgagttcagtacgtaattgagagatgtactgaaagtgatctggggagaggagagaagaagaggaaaggagagtaaggggaacaggggagtaataaatagagcaaaggcggggggatttcttgctctcacttgaattgccaggtagcaggagtgtcaatgggcaggagcgctcaataggcaggagcgacaatgggtgggtggtgtcattcaactgagcctaatacggaaggaggcaggcacaatatggctttggtgaatgaggcacttcaccatcaatagacctattaaggcttgaacttgacgagagttgatattgattgatattgatgcctaggacacattgtgaatagaatacttgaggcagaagagcagggtcctatacaaaatgtcaatatcaaattcagttaactccaaggcttccagtccattttgttgccaactccaggatttctcacttttccaagacgcccacacgattaacattaccattaagtcaaaataccccaaaacaaaagacctcactatctaattagtccagcttaaagcctaataccacctatgaccgtcctccccaagcgacttcttcttcggattcaatgaaacaatccgctgcccaggaagcgtatccgcagtgaaggccgcctcaaagatgctagcaatcccacgtttagcatagtgcgcgaaagaatcataatcatccgtcttcccattaatagccgcccactccagtccactaggcgtagtcccatccccaagatcactccaccgcgtaacaacaatacactgcttgaacctgcgatcatccagatcttcagtcaacttaacctcaatcaaatactcagtcggacactggggacatctccgcatcggccggcagaacccacacagcgtcgtcagcgcgttcggatcaaacgcctgccccgccatgcggtccttgacccggtgctcgagcccttgcaatccgcccgtactccgcggccgcggaatatgctccagcgcacacttacatgccggcatcagctcgccgtcgcgccagtgcgcgcacgcgctaaagtacggacagtagtcctcgcgcgagtgaagcagcatgcgctgcccggacgccgttaaacccggcgccgcgaaggtctggctggtgacgcggagtaagagcctgccggcgtggacgtggaagcgtgtgctgtgcgaccagttgtcgcgctgccagcggcggcccagcgattccggggccaggccgtagctgggaccgaagcggtgggcgcgcatgacgagctgcacgaatgtgaagggcaagttgcggccgtgcgtcatgcggtgacgaggtggggggttcaggacgtttgtggagtttgggcagtcgaagagcgggtttaggatgtgggttgggcggatgcgttcggttccttctttcgtgcgtctgtggtactttacacacgggatgcaaaggaggtggtgtgggacggagatgtccattccgacgaggaaattgatcttctcgatttggttgtctgggtgcgctagagccttgaggtatccggagcctagtcttcggtataatgtgatgctggccattgctaggcttgcggcttcggcgggattcaggtatcccgctatatgtgcccatagctttggtggcagacttgctatatcgccctcgcctggcggtcgacggtcattgtgctcgtatgttggagggtgaatctcgttgacgtcagatgttcctagcgtatggatgatttctgtgtagtcccgtcgctcacccagttggctgtccacttgcgcatgcaattccttgtatttaagtctatggagagccaatggagctaactctggcattggaggggcttcctcgacactggtctccacggccagccgtaggtctgtggaggatgatctgctgcccttgcggagggtttggcgggatttcttgggacgcaatgcgttggagaaaaacgacttgaagccattcttctggccagggctttctgccgacatcattgaggtgctaatagatgtaagtcttcgaggcctagatggagaatattagggtctgatgtttcggatgtctgcggtgatcttttccgcattacgcgatccgcccggtcccggtttaccgcattagttgacatcaggagaacaagaaatagtcaaacaagattcttatattatcaaatattgtatattgaaaacacatgctacaatacatatcaagcgcaagacatcatagcagcatttacaaatcaaatacagttatttaagcgaaacgcttctcgacctccttccagttgatgacgtcccagatggcggagaagtactcggccttgcggttctggtattggaggctagaaataattagtacggatattagatcattaaagaaggacctcttactagtaagcgtgctcccaagcgtcaataccgaggagaggctcccactggccgacgacggggtcctggttctgttaaggggttagtaactagaacaattcaagcgagaatcataacttacggcataggtgcggatggcgatacgtccggtcagcttgtcccgcacgagccaagcccagccactgccctggacgccagccagagcagcgttcatcttggactggaactcgccgaggccaccgtaggtggagtcaatggccttggccagagcaccagaggggggctcaccaccgccggcactcttgggggcaaggttcttccagaagagagagtggttgaggtggccaccaccgtggaagttgacggcgggcttgagagcgatctgagcattgatgtcacccttagccagggcggcctccagctgctcaacggcggtgttgtagccgttcacataggtcttgtggtggttattgtggtggagctccatgatcttgccggaaatggagggctcaagcgcgccatagtcgtcttgttttagtgttagttttagaaatttactctaagtatgtagatacagcttcttgaagctctaggtgatactgaagcaaccaacttacagggaagatcgggaagagtggccttgccacgggtaaaggtcaagcccgcagctccggccttgaaggtagccgaagctcccgagcgaagggcaacacgggccgagttgttaagaagagcagccattgtgaatgtatgtgaagattattatgtggtgaagataatgaggagggtgtcaattgtgaatggtgaatgaattcaaaagaaaagggttcgcggcggagctatgaagtacttaaccgactataacgtcatcttgttttcgtcggctcggagctatgttgttccgagccggatccccacgtgaatttcatgagctctggactgtgactgattgttcgtctaggacactacttgcttgatcttgcactttttgctgaaaaagaggggacagttgatttggccacaaactgccaatgaacccctaaaaagatggagtcgccttcgtcttctgggcagaagcgcaaggtcgctgacatgagctccgatgaagaaaccacgcgcccgaccgttggctttcgggggttcgccagagctgcctcgcgctctgtgacacctcctacaatgggtggactgggtagtggaccccgcaataaccgaaacaccatggccaaccctcgaggtggaggatcgtcacgaggtgggaaaggcatgggaggtggcggtggaggaggacccaacagcttcgccgcgcgcatgatggcaaagatgggatacagggaagggcaaggtctcggaactactggacagggtatcgtcaacccgattgaggtacaggcgcgaccccagggtgcaggcttgggcgcagtgagcgagaagtcgaaaaagactcgcgaagaagagcgccgagcagctgcacagaagggtgagattcttgaagacagctccgaggacgaacgacagcgacgaaaaaagaagaaggaggagcgcaaggcccagagtcggagcggcacaggtacaccgatccagcgtgcgaagcccaaattccgcacagcgcgcgaaatcgaagatgatatggaaggactggaagttccaaatgttctcaaatcactcgtcgatgccaccggaaaggagcagcgtgttctcacttcgactgctggcctgatgtccacgcaacaattcgtcagtcaagaggaaggagaagcgttaaagatcgccaagcgagctcgaaatgacctggaagcatttgcggatgaatggaaggggctgaaagagaggaaacaattcattgaactcgaagaagcccaggtcgtggacgaattggatgcatatcaatcccggatcgaccatctcacaggcctaatcgccgcagtggaagagctggacctctttgaacacgacgaaagtatcacggccaaatttgatgagatgacggataagcttgaggatttggaatccaaatatcgagatgctgttgatgagcagcgacttccagagaccgcagtcgccgctctacatccgttattccgccaggctatggaggaatgggagcctcttgaaaatcccacattcctcgtgtccaacctcactcgtcttcagcctcttctgtctcgcaccaacaagttagaagagccccggaaacgggcatccacttcaccttacgaaacgatgatttataccctctggctcccacgagtgcgctcggcacttctgaatgattgggacgtttacgacccgtccaaggcgaccgcgctggtcgtggcctggaaggcaattgtaccgccatttgtgtattcaaacgttctcgaccaattgatcattcccaaggtgggcctggccctcaaaaattggaaacctcgagctagccgacgacacgccggctccgaacaagatggaaagttcccctggtggcttttcacttggcttcaatacctggatgaacgacacaccaacccgaaacagcccactggtctcatgtctgacgcgaagaggaagttccgctcggtactcgacacatggagtctgcgcaagggtctggtcgatcgcgttgagatctggcgggatgccctaggatccgaattcgatgtatgcttacgcaaccacctgctgccacgtcttgcgcgtcatcttcgcgaggacttcaccgtgaatccgcaaaatcaagatctcacagcgctcaaggatgtcttgtgctggaagccattctttcagcctaatgtcatgggactattgctggtctctgatttcttcccgaagtggcacgagattctctacatctggctcaccaacaaccccaactacgaggaggtcggagcttggttctcttggtggcgcactcagatcccggaggagatcaacgagctcaccatcgtcgatgatgagtggaataagggcttgcaaactatggatcttgccttgcagctgggcgaccgtgccactgctgaactcccacgcccaaccacggcacagacgcttcctacccgggaagataaggtggcagcagctgcagcaactgccgcagcggctgctcctgaaccccgggttaaggcaccggtcgtggaagaagttgcattcaaggatatcctggagggctggtgtttggaggagggacttatcatgctacccctgcgtgaggctcatccgcaaaacggccagccgctgttccgtattacggctagtgctacgggcaagggtggagtcgtggcttttgtccaaggagatgtggtgtgggtgcagaataagaaggcgaaggagatctgggagccaatgggattggagaaccagctagtagagcgtgcggaggggcgatgaataccggcaccatactgtgcattaggtggattgacattgtaattgaaccaaatgtatctattcaagacatacaactttagccctaagtggggatgccatggtacattgcagagggtatgtaattcagtgttgtaaatacttattccaccagtattcaagtaggactgatctcgatgtcttccattatgtcatatgtgtgagtaggaagaaacaactatgttacatcgtgctattctaggattgaagatgtaacaatgctgtaatttactgtgcttcaacaatccacctaaaatttagacaggtcgctagtttctactagtgcaacctaccttgcacaaactgccaagcaattcagaaaaaaactgtgcaatgatgcttagctgacacgtagttgtcccgttgtggaagaaatagaagtccatagaaggccgtccactgttctgaaaagcgtaattccgctcggatttaaaagtctcggggtattcgggatctcggctaattggccaagatgacaaactccatggaatctcatccgaatcctcggagctaagtgtgcaagaggacctccccgcttaacggatatggagtactccttcctcctcattggtgcttgcagtccaggtgaatattaagacgggaaagccgcaatggttccacggtctagaataacatggtccgccaatgatactcctccaaatagactagtggagctatagatctccaacggaaatgcgggatcgccggttgcagccaatcacctcagggccaaaggtaatcaccgcatccttcaccaatggaatcggcgggatttgaacttgcctcgccgcctaagaggacaaaactgatgtcgtgcagatcccataccttcgtttggctgtcagcgctgacatttgaatgtcctgtgattggccctagacccctccttggcgaataaacctccattattttctgcttggcttgcattaactgtgggcttttgcttatttttttttttccatggcgcttgggttgagaccagtgagcgtccgtggcactgggatgttaaaaggggtgaggcgtggccgatcgttggagtggatttctttcttctcttcttcatactttgtcctatagtcattgttgatatccgtcaaagactaagacatcaattccggatccttctgctggaccaaataaagtgcaatcatttcccaactttgcctttctctctccatctctctcgccagcttgtaattgcgtggtggacttcctacaccgtaccttggagatatctagaagcatatcagtttcccggatcagcatcatggccttgctcttcatcaagcgaaagctattccccacaaaggatgcggacagaatacagtcaggttagtaaggaaagagcatacacccaaagagacatatacttacaggaattcaattcaggcaagcgcctcctcgcccgcattgagtccgacgataccatccgcgcagactctgagcaagacctcgagtcccaaaacggccgctcttacgacaccttcggacggtgcaacagcccagacgaatcagcaataacaaccaacagcaactgcagcacccgcgagcgcatcaacccacgtatcatctcagatgccatcctcggcctctctgacggtctgaccgtacccttcgccctgagcgcaggtctatccgcactcggaaacaccaaagtggttgtgcttggtggacttgccgagctggcagccggagccatctccatgggacttggtggatacgtcggcgcaaagagtgaagcgtaagtcatccacatctggcaaccaatcagcatatgtactaacaaatactagtgaatcatatcaaacaatcgtccgtgaaacacaagagttgatccaaacggactcggaagagacccgcgccatggtgcgcgagaccttctctccgtacgggctctcggactcggcagttgcggatatcacgcgcgacttgcatgcgtctcaagaccgcctgcttgaattcctgcttgctttccatcaccgagagatcgctcctgactgtaaccaggcgtggacttcggccatcacgctcgcgctgggttattttattggtgggttcattccgcttatcccgtacttcattgtctcgcagatcacgattgcactgtactggagtattggtgttatggcgattaccttgcttgtgtttggatatgtcaagacctgtgttgtgcgtggctggtctggccgcgctaatgtgtgggctgcgatctggggcggaatgcagatgtgttgcgtcggaggtgtcgctgctggtgctgcgatcggactggtccatctcattgatatgggtagcacttgatgacttggtggtgatggtactaatgatgttcacgttgcaattaagcgttcatgcattgcagcagtggggtttttgctttctctctactcctaatgtttctcattttttttagctcggcagcgggcgtttcggggacaaagctgcaaaaagctttatgatacacgtttaacgaaaaaataattcatttcccattgacaatctcaagttacatttcaactaccaaggcattactggccaccttagatagttatatagatatataaaacacaaaaccctataaacccaatcccaaatcacccactcaacgcaatcccaaccaacttcttccccttatccgacaactgaatcttcaaagcctcctccctcccacgctccgacatcttcccccaagtcttcctcaaaatgtccaccgtcttctcctcatccgcaagctccgtctcaaacttatcaaactgatcatccaaaaagaccaaacaagcaacatcctccagcgtctgcgtatccggatccccctgcttaagatccgccttgcgcaccagcgcgcccactctcgccgcctcctccgccgaatacccactctcaacacagatctgctcgaccagcgcagcctgtcgcctctgcagtcccgcgcgccacgaatggtacccgatctttgtggcggggtagctgtcgcgcggcacttcccagcgacgcaggtgttgggcgcggattgcgaggcgcaggagctctggggcggaggggttgagggttgagaggtagctggtcattttctgtgcgtagtggagttcgtaggggattgggccggtgggtgtttgggtttggcgggggtcgtcggcgtgcgctgcgtcgatgcgctcgagggctgcttcgtatttggtcatttttggggggttgttggggtagatgggataggtggtttgttctgagtggtgtcgttttaggagaggagtttgcgcttgggatcaattggatgtaagagcgcttgaaagctgggtggtttgatatgagggttttagataagaatagacgctagtccgggtgtggcttggtgtgcattgtaaatagatgtttctaattggtcgagtatgtattggatccacatttagttagtcccttgtacatgacgaaggcggtagtaaaagcggtaacccgattagggtcccgaggtcctagagcccctgaagtggtgatctatgaaagcaaactagttaacaatgcaaatagaagagttgggatgactgtgtggagaaaagcagttaaactacatagcaggtcattttgaagggtccacttgtccagactgtgggggatgactaataattcttttgcttgctagttagttagttaactaacttacatcccatcacatccatctggactctgcctgacacaatacataaagaaaacttcgatttatctaatggccatcccatggagaatatcgagccgtgctatccctccgaggagcattatctcaccgctttacattatctccaggaacatgtctacccagatggaccagcgcctctatatttctaccgttgatgctgagccacttcatcgctaccgaaaaggtggctaccacccagtcaccttgggggaatacttgaaagatggaaggtataaggtgttgcataaactagggtggggaggctactcaacggtttgggcagcaagggatcaaaggttgtacaagctggtgtgacccgaaatagttctagctgactgaaaacagggaacagacgtatgttgctgtcaacatttctgttgcagaacctgaatattctggggacacgcgagagctccaaactttgaaggtgctggcatcttatcaccctcacacggtacaactgcttgataacttcgatctaaagggcccgaatggatctcataaatgcctcgtctatgagcttctcgggccgaacgtcccagatacaattgatacacgctttccagatgggagacttcctgggaagcttgccaaagttattgcaaagcaatgtttgatcgggctcgatggtttacaccaacgaacgattggacatggaggtaaatcacttttcttagagatgctttatatggtatggcacttacctagcatagatctgcatacccgcaatttagccttcactatgccttacatagacgatttgtcggaagaaaggtttattaggatgctagggaaaccagatattggctatgtccaaaaacgtgaaaattgtgataggaaatgcctagaacctggcatacccgaatatattgtgaggcctgcctcgcgtcagacgctttggaatccggctcagactgtcaaaatactcgacttcggagagtcgtttttacacactactatttctaagacactacacactcctttatctctccgagcaccagaagttatctttcgggatcgcattgatcatcgtgttgatctgtggagcatgggctgcatggtaggtgaatccacttgtaatccttataaaccaaagactgatatgttggcagctctttgaagtgttcgcaggccagccacctttcgacaccttcttaataactcccacaattctcgttgaccaaatgcgagaaatggcaaccgacagtctacctaaaagatggcaaggggtgtggaatacgatgaatgcagaggagggcatagaaagtagcggacctaacttacaggaatggctggaggatgtgtacttcaatagcccgctgagtcccgatctcacacgagaggatatagtgaggctgggacaaatcgttggaagattattgtattttgagccgtctgcaagagcgtcagcgagagacgttcttaatgatccttggtttaatgagtgatcctatgactatttgttataacggggagctgtcctcattcgtactgtacctagaaattttcacttcttcgattatcaagtctgcgtgctgaaaatagtctctcttcttttgcatcgaccacatcaataactacccaagaaatgtatgcttcacatacaatgaccctgacggctaattatcactgtaagaaacatccaatttgaattaacacatctataggatttgatctttcccaaacgctttgaacagcaaagaaagacacctacataacatcaatatccggccgatgattaacctgcgacgaactatttcgggaccgagcactgtcgtaattacaacacgcaacagcaacacatattacacaatcacaatcacgacgaggtgctgcccttttgggggaacacaagcagctcttgcgaaacatcagaaggtgtcctctccacctggtaagccttgtccttttcaaagatccgcgccacctcttccaaagacagacctttagtctccgggaagaggaagtagatcgttgccatgaaaatcacaagacagcccagatacaccaggaagtatttccagtggatggccgccaaggccacagggtttatatactggttgaagaagcaagccatcgagtcggtggtgagtgtgatggcaaggcccttggcgcggagctggaagggcaggatttcagctgggtatgcgataaacaagggcatatatgccatgtcgtaagcactgcagaagaggaaaagcatgggtaccaccgcaataccagcctccagcacatgcatctcttggaaaagacccgacatggtcgtcgcggcggataggtagatgaacatcaacattgtggcgattagccagagttttcgtcgtccgtatcggtctgcggccattgctccgccgactgcgaatgccaggttccacacctgcaagctgatattgatggcggcctggtgagatgcgttgtatataccgactgatgctaggatcggggctaggtaataagaaaccacgcctagaaaaagttggttagaaatcggattagaataaaagggacattttaggttcataccatttccagaccattcttgcatgaatcccagaatcacgcaaatggatagacgatgcatgttgctccgggatgcaaagaagctgctccagcggcggcagctcttgtcagactccgcattgatgctcttgcaaatctggtagaattcgtcctgaacaagttcgtcgttctcatcaccattagcgtgatatcttgctagtatagccattccctcatctttcctgccccgggagaccagccatctcgggctctcgggaacaaagcaaagcccaaccaattgaaggaccggatagaagatctgcgtcaagcaggggagtttccatgaccaactccctacgatggtgagtccagcaaaaccaataccagccgacgtgatcgacccgatgaaccaaagtgcattgtataaacccgtgaaggtctgtcgttgacgtgggtgtgttgattcggtaatgagcaatggcgcggcagtttgtgagactccgactccgattccagcgagaacacgagcgaagaagaagacccacggattatttgtggcgacttggataatcgaggcgatgatcactaaagtggaaccgatcagaacgcagatcctccgccccagattgtcggcgatgtaagatccggggatgaatgagcaaaaagatccgagtgagacagctgcgataataagacctcgagcatttgtgtccaggtctttcaaaaaattcgagactgttgttttctttgattagctttgttcctatatagcatgatgtataagatgcctacattcgggaagcaccaggaggccattgatcatgctagcacagtatccagctgtagccgatgcagatagcataaacccaatccctaggtttagttttcgcagccctggatccttcatccagctgctgttggtgttgttgtgtaagaccttggaggccatgtttggcgatatcctgcaaagacagtgaatgtcgtggatgaatgtttcagatcttgaactccgagctgtcaagctcttttatttaaacattgaaaattaattggtaaaagaaaactccgagtgacaatgcgccccaacattcctaggatttatccagggcccgaaatctccgcgcgaggttacagctgtagctaaggagttggaatgaagggagggaagtcaaatgatctgatcaccggacgatttccctgagtttgctctgatccaagagcttggatgtgacacgcctgtcaacatgcctgcttaaggtccgcgattggaatatgagctttcaaggtcttggagagctcggatgtttcaggaatgtttgtagctctcatagctccctcccctcacttttacccacggggatcacttccccggttgcctaagtttagcttgggattcgtagctatagtctccgtatggattcccttgattattggattcgtgatagatcgactcgcccttactcaacgatttgtctctggggaaacggggtaaggaagtttttctctgcagaccttctaggacaagcacgggctatgattttctttcttaggttcgtgagtcaactcggtgtaactatctgctctgcctgtgcgtcacttgatatttgaaaaggtctgaccacggagagtctcgaatctgaaagccatggcagcgtggaatgatattacttcgttctgacgcggacagccttatggcgccaatcggaaaacctcatcaggcaacccggtggcttatggtttccccctgcttagagttgaagcagattcaagaaaataaactttactgtttatgatatgacggttgagtatactactactagtagtaaatgatatcacgaagcatgagttacattgtagattagactgtagaattgatagaatcaagcaacacccgaggttcgtttgaaacgctccggatgttactcctgagcggatgccgatttccatggtcacacagcaggattgaactacccaagtaatttcgactcacgggctagagctcaagagcgttatctaggggggtattcataatattcataagagtgccgaactaaaatccaaggtagtcgattactaaggttagttagggctcggtttgagcttatttggttccaaggtttgtgtcttggtactataaaagcttggaagcttggaagcttggagaaatgatccctgaggttatatacttcatatattacgcaagtatctgtttatgagaagttatctggttattctgcatctcctggagcataaaattgtggatatatatccgaagaaatatacatatcaatgagacgtgcccaacgatatgaaagtcagaatacaacgatcccgtatccacaaagatccaagggcactataggccttacaggagtaattattcgtgatttctgtttctagaacccacatgaatctgtgttgttggcaaattgttgcttataaaccaccgggatgagctgtcaagtcttcacgggattggaagctctagcttcggagagaccccgagacccccaggatccccactaattgaataggggtgatatgctctgactcgtcaatctcattcagccaagagaaactccgcaggcactgccacgatgccaaggcgcagaagttgtttgagacaccggaggccttggcgtgagcttacccttaaaccttagatggcggaagattttttgtcttatctgatcttcatctcgagccctaccttccataccatcagagtcctacatcaacctactcttggcctccccaaaccgaaaaaatgacactcctccacgaccctctaaacctcaaccaatacaaaacaactatatccgagccaaaaaagaactgggtcccaatctctttcagcgacgaaaaggaaaagctcacgggcttctacaaagagcaaaatgaaatgatcgagggcttcctcacagccggcgaggaagagcgcctaaaagccgaagacgaagcccagaacggcggcaaagtaaagctagccgtgcgcgccagcttcacagtcaacttcttcctcttcgtcatccagctctacgcagccgtcacaacaggctctctcgccctcttcgccaccgccgcagatgccttcatggacctcgtttcgtcggttgtgatgctagtcacgtcgcgcatgtcctcgcgcccaaagccatacaagtaccccgttggccggcgtcgggtcgaaacaatgggcgtcatcatgttctgtgcgttgatgaccatcgtggcggtggagctgatcatcgaatcggccaaggcgcttgcggccggcaagactgagtccgagcagctggatctcgtgccgctggtctgcgtgggcgtcgctatcttctccaagttctgtatgttcttgtactgctatggcttgcgtcggtatcccgctgctcatgtcttttacattgaccaccgtaatgatctggctgtcaatgggtttgggttgatcatgtcgattgtgggtgatcggttcgtctggtatcttgatcccattggtgcttgctgcattgcgctgcttatcttgttttcgtgggcgtcgactgcgtttgataatatgtggttgattgtgggcaagtgtgccccgcgtgaattcctgaataagtgtgtctatgtgacattgacgcacgatcagaggattcagaaggtggatacggtgagttgagaaggtgggtgtattattgacgtttgactaacggtgcatagtgtcgcgcttatcactccgggcagcaactctatgttgaggttgatatcgtcatggaccctgagactaagcttcgggagtcccacgatgtaagccaagcgttgcagcggaagttggaaggtctcgcggacgtcgagcgagcctttgtgcatgtcgattatgattatgagcatgatgtcaacgaggaacacagaccactctatgagattggtggatcgaagcactccatccgagctttggtgaaacgattgtggtctagaaacgaggagaaggcagacgggactgctgtgtgagaagcttcgggaatattgattgagctgggctccaatgtctcggaatgttatacgcagagtatgaatgcagtaaacaaaattaatatcttaatcggttttatgaacgccgaaatagtttctcacagggcaatttgtcagacataaaagcagaacatgacattaacactaccggacgttcaaaaaatgatatcatctcatataaacactaaagggcaggggctctcttcttagcctttgcaaacatgccataaggcttgacactaaaagcgccattgaaattcttcccttccatatcaaatgtatactccttatccgccaactcaaaatccacatctttgataatgcgaacgagcgcatgcaacgaccattcccaagcataccgcttaccgtaacactcgcgcttcccgttcccgaaccccttcttcacaccgattgggagccgatcaaaggcgtcgccgagcatgcgctcaggcttgaaagtattggggtcatcaaagacagcagggtcacggttgacagcagacagaatagcaatcaggggctgagtcttaggaatctcgtattctcctccgagtatgaccggaccatgggtgggcaacggctcgatgttgaaacccggggctgtggcacagagacggaacgattcgcggaggacggcctcgcagtagggcaattgcgagagatggaagtgttcgatttggccggagggaccgaggagggtgtcaatctcctgacgggcacgagtaaccacatctgggttcttggcaagatagtacagagtgaaggagaggagattcggggatgtggcgctgccgatgaaaatgttgattatctcgtcgatgacccggctgtctggaagggattcgcctgtcttcgggtccttttcgtggagtagagcatgcagcaaatccctctggtctataggcttattgcgtcgcttggcgattatctgcgcgcaatagtcgcgacaaatcttgatatccttgtcgaatgtactctggtacatgagtcgagtgaggagcttgggtcgcgtgggccgacgcacggcttcaaaggtcgtgtctgacattgctttgatgacggcgggttctgcaccaaggacacagtctacatactgaccgaagaagcatttcatattggcagcgtggtttagtcggtccaaatcattagagacatccacgcgctgcccggtgctctctgttgaagtccatttccagatcaagtcgtccgtcgtgagttgtatatccctatgcatttccttgacggcctcgggtgatacgaatggagccatgatacgatgcgcgatgccccagctttcctcgttgtcaaacgcagtaaagagactgtcatggacaagactgcggatttcgacaatgggaccggtgacgcattttcggaagcgcttctcgtcgcaaatttcctcgagaagagcggcgtttgtaatgaagacaagttgcttggtgaggattttgattttgaagataccagctccaccatgttctgctgccagcttatttaaagacgcccaggtattgccagggatcatatcgaagatatttcccagaattggaagcccctgaggctggggaataggcgacggcatggtgtgtatagactagagagggagttgggaatcttcaaaatatggcaacccacttgtacttatcagtaggacgaaaggactcgtcacaattgaaaagtatgcaggtaggagctcgcagctcttgtgccacatgactgaaatgacaagcctctgagtggtccacaattagctttggtgacattgcgatgagcctgaagatttccgtattctcgtccaattagagatcgtattgtcacaaacatcggagaggtgcagctaagctgcagatgaactccataccccgcgtgcccacatgatatgtgatgtgtattgcaagtgggaagatcaggggaagagcgtattgaaatagagaagagtaaggggtagagttggtgaatgctgccctgagaaggcatttgaagccgctgacaaaccaagtagacaagctatttggcatatcaagtacaagccaattacgactacatattccaaatgcagcttctactgtccaatgaagcgtcttgtcatctattgaatcgattgactaattcttcctcgcctcgtcatcgcggaatgatatctccacgctgccaaggccgaggatccaaaaattcatggatgtaaaaaaaaaatgtaaggaagtgtcatgcacactccctgtaatcattgatgaacacagcagaccatcgagggtggccggtagaagaatcatggaaacaagctgcaagcataagaaaccgtcaagaaaatcagaataaccaaccattacagcagcagatctcgaatagctgtgcgcgagatataagaagaacagaaagaaaaaaaaacaagggcagggaataaacaaagcttacgaaataaaagcaattgatcatatccactttggataactttgtctcccgcccaaaacgccgtccgattgatgaagccgggtatatccagcaccgtgatgcaacatgtactgagaatgaaaaaaaagagatcaagaggagggaacgaggcattaagtacacgcgccttgccacagtagcaagactcgagccgagccgtcaaccccatcacccctaggttaatatgggcagaattggtgtttcatcgaaaaaaaataaacagaaacagcttttggttgattcgaaatgatcatagaacccatttcgtcatctggccccaatgccgaacatgcctaccccgtagctagcgcttctttcggacataggggttgacaccttagcgacgtgaccctgattagattaatttttatcaacagaattagttgccatggggatgctttaccttcttgcgtttcttcttcccagttccctcgccgttcgagtagaatccggggtcatcatcatcgtccacaaacccttcgccatagccggcaaagctattgtcatcataatgtcttttgcgacccctgctaggccgtggccgatctgcttcctgtggttgcggagatgggacataggattgggaagagaagcgaccagcaggagcgggaggagccttcttgccaagctcgcctggcgctggattcttagccgccttttcatgacccaagatatcttcccagaaatcgttgttaggaatcggtccgggttccatttgcatggctcgcgattggagattttgtagcgccgaatccatgtctgagaccttgatagctttgccatgcaccttttggttctgccattcctcttcaggccatagagtcatgtacctcagactgccaggggtaccgatctccttcttgacgggtttgtttcgcccagagagtcccagtcctttcagctttccttcgtatgatttcctcaagcggttgatcttctcccctgtcaccggatccatgcgtgctaccgaatgtgcgatcgggcctaacccatagagagagacgagatccactgtagggtcgggaccagtaacgatcggagctgtcaatgaggaaaaagcagtgttaacaacttcagtcccaagaatgtgcaagatcagtacattcatggagctgcacacagtagatggcatgatgcgttttggggaatcttacatctcttgcaaagatgaaaagtcgaggttagctctttctgaagagaatcgagatcgagactgagggtgtctgcccgagtcgaccctttattcatatccatagcgtcggagtctgtcgaatgttgaccttgcccggtggcaaagtcagtgctgtctgtttgaaaagattgccgatcgtggtcggtcggtctgtgctgtgttgattgctgagcgggacttgctcccgagttttctgccgagtcctgcatccccatattgaaagattttctcccctgatccacatcgtccgaattcgcagtagggtgtccactgacactgctggcgggagtggggaatgcattggtggtgctcattgtgggctgttgggagacttgggtagacattggcgcagaggacggaggggaggagatgttcggagagtggaccgtcgcctgattcggtgatgatatgaagttggcggcatgacttggttcgctcaccgacatcaacggaggtgatatcggggtctggggaatgtggtccgaagaaatagggaaccggatgttctctttcagagacccggcgggcgaggagggtgaaggaggtcttgcttgaaaggaggtagggtgagtgcgatcagacatgagagcccgaggaagagttcagcatgcagagacggtattaaccagagcggctctgggtccgaatcgcaagtttgataccagggcctggagagggggattcccgatcacggtcgacggtcgctcaggcaggcgggcaggtcattcaacgggcggactagatcgtcttcattccaggggactagagtgaatccctgcgagtggtaaagattgggtgcgtgatgagtggcggtggtgaaggagagtgatgatgggagataatcctgtggtcaaagccggcgaggatgacggcgaattgattaattcacgtgaccgggcttggcccgatgtactttattcccattgtactctattgatctatgtacaatgcaggtattcattcatgtatttgtctattcattgctattctctgagttgggtctttattctcaatacaatgcgaccatatcagtccatcaattaactgcaaacaaccctccccttagcgagtggcgagatcaagtaagattaaactttgtatggcccctacatttgccgggaataatcccccgacacttgatcaatgacattacgcgttgcattcatatctgtaggatatgctaatcagattatgccacacctggacactctgcagatgttggtggcgtatcccgggtcttacatgcgtccatttttatcccaaccctccaagtcatgaatagaacagatatcaaatggaacttgaaacaattggaaatggtatctcttactatttaaagactattcgacaaaaacaaagtcaggtggtccaggatgcctttcttggcatgggtgacctacagcccggttggtaatatgaccattcaagaagacatactcgtggatgtcagaagacgaaccagtctaagacagaacatcaagtgatatatcgggaatcaaagcacaacccccaccaagcgccagagctcatcaatataaaatgatgcccgagagagatctgacctcaggactgatagtaagcattatactcattaaccagttgggcagacacgtcgggtatattgtgttcgagggaagccaaaagctcgatttgctcttgttggctgagagtgcgctcacgccatgaaggtactggaaatggctcgtggaagtactgagagtactggtctgcaatggagctggaccagttcatgggattgacggtcgcatcggtgtatgccaaatgacctgcggttgtggaagcaagtgagaagttggggtcccagccttgaaggccgggaacaactgaaggtattgtgttataaggggtgttcgggtcaattgataaatcggggtagagcgtcggcccagagtaagctgctggtgtataatgtggtaccacacttggggctgtgattggtcgctgcatgtcaaatgtacaggaaaccgatggcacttgtggttctttagacggtctagggcccactgcaggtggggttgattcttgcgcaaatgtaggatcagccgactgtgccctagaacaggtaccgtttgaggcggtatcgattgatagattgccacggtggttgttggaataatacgaagcagtcgtgctacttgacgggctggacatggctggaggggtcagtccctgtgaggaggttggcgtaggatggttagaaggcgagtgtacaacgaacgattcttccgtcctgtacgctttcaggcacgcagcaacaaggcgcctgtaaagaaggaaggcagattggacacctggccaacgttcggcggaaaatacaattacttccatagccatatccaaatggccttggacttcctcaatggtgtgctcttttcgaatttcggggtatgagagggtccagagcacagtattcaaagccatgaacagggcttgcacaaacacccatgtcaggtcgacagatccagtgatcatctgttctttatgcatggcgatattggagatggccgcgtcataacaggttttggcagcattgacggttggttcgggtatttgtggtgagggacgatacatgagaacaatgatggtattccgtctcccttgaaacctgtagaagttattgtcagcaaagctgcattgggggaaatgggtatatcaacgaaccatttcacgttgagtccactgccatcatcgttcttaggagtagtggccatccaatggtcaatcttggccaacatttgagaaaaccatggatcctgatcatcaactgggctctctcgtctgtttgagtagagcattctcctgggctccaattggagcagtcgcattttgaaaaagtgaactgcaatacactttgctagaacgggtttcgctcccggggtgatcccctcggcggtgatgtaccggtcatccaccagttcaaagaatttcacattgatatggtcgtggctgacgcagtagctactgcatcgacccagactatgagaaagaccgaactccattgatgagacgatccaaaataaccttcgacgcatgtcaatctccaatggatttaatggtttcccacacggtgatttggtgacggtggcttcttccgtcaatcccaagtcctgacaaagtttggcagccgtccccacgacccagtaggcagctgtgcgagtgggcgttaccattgaatatgaggcaatgagcacgaggcattgcagagcccctaaatccaatcgttttagtgtgggttccaggtagggcaaggccgcaaggtaataactatcagcgagaccagcatattctgtgctcattttctgcatgctgatggcgatgaccatccgcagttggaagtttttgcagggatctgtagagccattgaatacctcctctacctcttgtcgaaatgtgggctcgtgcaggagcggaagtagtgcttgtgctatacaacgaatcagtcacacgagctacaagaaaaagaatcagagcaaagtgatcgcagtacctttggccacaaaaagatcaatcaacttataggtcagggtctttggaggtagattgggttgtgggatcgagcttatcatgggatagacttttgatgtcggtttcgagtcttcttgggtgaaggcatctttgatctcttgtgcggtgaattcgggaacaatatccttgatgcttttggagtcggtgttctgcttggccatctccatgaccaatcgggtcatggcgatgccactcgaggcgccgagatatcgcggctcatcgttctccttgaaccggatgcgcccggccccccgcaccatcaactcggcatcggcagcatgttgtacctcgttctcggctttggcaagctctctttctaatgcgcgggctttctctctgagcgataggatgtatgttcgaggtatagttgtgtcgcgggtcgagtcgtagtacacgcacttggcattgcttcgttcgcagggcgcacatcgtggaattccggggtcgcatctagattttcgctgcacgatggattagttgggaaaagcaccaaaaaaaagggcataacactaagggaggagcaaaaggttcaaggtgacggggatgggggagaggggatgtctcctacatgtctacaccttgtgcaggcggtcaatgtgtgagcgatgcgaccgtccggtggctctaatgagtgtaattccggcgactttagccctgtggaggaggagtccggacttggggtcatggtgggccaaaaagggtataagattaaggaagtcgggaaggtccaatcacattatacacgatttatacccaagggacctttcgaagaagcaaattgcgaacagtcgacatgatcttgaggctcccgaggccttgacaagggggagattcgagtttgaagatgtgaaacggagaagaagttgtgtccggaatgggaacgaggccactaatatgcttttccaagggaggggggccctcggtccagatctggagagaaggttgggcgtgggacaaggtgaggtggatatggtggaggcacagagcagctgaaaagagagacctggactagtttagggaatagatggtgtgatgtgggtgtttaatggggggttgctagtatttttccgatagttgatggtattcaacagtggtttatagtggtttaatcgacgtaaccaacatcttcatagacacttcatagccccaagagcaccttagtaataaagacggggagattctcgccgtccgtgcggttccacagatcttccctcccctccctctcctgtcctataacagccggtctcgtttaaacacatcggatttcggtggagttggcttttctcttcaacgtcttcggctaaggcttatttctcgagcattagtcgctaatcctttccctccagggccagctcatgcaggttcaccccttcggccctctatttaatgtcacgtgagtcttttgtgccgttatgtggagatgtgcagggggggagagtgggggtcccatatcctcgaatttactgaccgtgaccagtataatgagcagacatgtccgtcaccgctacgaccttcttggataatcccttgctcaaggtgagtcggccagtcgccgcctgctcgagatgtcgcaccgcgaagatcaaatgtgatggcaagctccccgcatgttcggcttgcgaaagagtcggcaaggcgatcagttgctccggagcaagcgatgaattcgccaaggggaaagagagaagttatgtcgcatcactggaagggtattgtgagaaactcgagaagaagatcagtcagatgcgtgcccgatcaacctcgctgtctgcggagggtgatgggatccctcgggagatgtcaatcacctccgtctcgtcagagagggcattgggccctgcccaccgcagagaggtttcggacattgacgatttagttggcgattttggtttcttgttagtatggctggattgctttcttgaccccgctgacacttcaaaagatctgtcaatgcgacttcgcgagacttccacggcatcacctcgagtacctccttcgccaaccttctcctctccgtcgctctagtcgattcctccccaccctcctctccgtattcactacctgcgcggcacgaagcaaccccgttgctacaatactatttcgataatatctttgtccagctccctttctttatcgaaacgagcttctggacctcggtggatgccgtatatcagtcaggcggccggttcgccaaaccgttcgatcattggatgctgcgcatggttctcgctatcgcttcggcgtcactctcataccatcacaatgataagagccaccaaagggcatgggctctcgtgtcggaggctttaacatatgccgaggaagtcctccgccctgggtcaatctcgggaatccaagcaatcctactgcttgctcaatattcttttgttgacccagtacgcttccggagttggtacttgattggaatggctgtcaaggttgcgatagatctgggcttgcatcaagatcccccggctgaggttttgactaatcccgaccgacttgatattcgccggcgtgtgtttcattccatctattgtctagacaggttcgtttgtttctgttcctcaattgctgccttgctaatcttctatcacagaggattgagtcctgctatgcagagaacctactcgttctccgacggatctgtaaatgttgcattgccatcaattaccgcaccaggggccctcctagagcagactcacattttcctgcgcagtccgggacctgccttgcatatcgttaaaatccgacagattctgtccgcgggctaccaagaaatgcactacagcgggcgcgatccatccccgcagcctcttgtcctcatctggactctgtgctggcgagcccgcgaatggttccagcaatgccccaaaaatgctccaaaccacttttcacttctgtaccgactagaattattatacaccattatcatcttgatatccccttcacatcgatacccaattctccacgactacagcaaggctctcttattcgaccggtgcatggactacatcagccaaattcaccaggttctagaaaaccccagcgccctgcccttcctgacatacttggacatccagcgcgtgcaccaagtgggtcgaatattcgtcaatgtcctgtccgacaattacgacatgctcattagcgccgctgtcccagcaccccctcccgtccccgctggcactccagagccgccagtactgggcgacgaggacttgttcaattgccacgcacgtgccatccgctgcctgtcctatatccgcgacatgctcaaatattgcgacaggaagtgggacatacatggccatctagagcagttcgaggacgagtctgcgtccatagagaaaactctgatggatggctcggtgggctacatgtcgagccaagagatatattgtcaagacttgttgtcgggaatgccgctggccggcgatgcatattcggggtaccatatcgggttatgaaagcattttctgtgtgatatttgggcatatgaattcggaaaggaaatgagcgtggtttgtttttggttttgtgaaatacccctccacatgatgtgtataatgaataatatagtgtgaatcggtccaataaatgggttcactacacactggtactttactggaacttacttcgagctgtagtacggtgtattgatgtacaacacctacctgccttacttgcaaggaacgatgctgtgttaatgggcaataactccatgacatcattttgaacttaatcttgcattttaggaatactatttagaatatatatcatgcattgccaattgtaagttaaccattccatcacccacattcaagcctgaaacgattgggctttatagattgctcatcatcataaacatgcacagcgtcatatcccatgttccagtcaactcatagcctacttgagtttataatataccgaggctttagatttggcacgtgaaatcaaaaaccacttgatgctgatcccgatgcggcagaatatactgtagttacttgtccccggtgacatattcttattctaggacaacatatttaggtctacagcgccatgttcttcatgaaaacagcaatgatcacaagtgaacaaagcaaggggaagcggcttgtccgagctatgaatcctctaaccattcccgaggtatgttgtggatggttcaactgcaggaactactgaaccgatccaatcatttacttgtggactttacttgtggacctgggcttgggcagaccggtagttttctagacgtttccacatgatccaaaccagccctaagattcatggagtattgagtttatactatagcacaataaacacaaatgaatgtatagcagtcactgaatatgccttgctagttgattgctgttaaacccgcgaaggccgattgagtctgcgcctagcgagtcatacaatgcattagtccggctcgatccgaggaattactccattcaaagcgagtggataggccaaaatgtcctttgttgagggtggatatacgacgtgttgtatgtactccgcacatacggacctcgggagtagtagtggaaacattgaagtgccttataaaccaaatcgaggccaggccggcgaatttcggacagaatgggaatacctaaggaaacaagcatcttgtgccctagcattcgaagacagcaatggtccatggattattgagttgttatatcattttctcccgatttggcagttaccccttatagttgaaggatatccaatattaaaaacggcaatagatcggaaaaaccaatggatcacggcatagcatgggcctatgatgaaaaaaattcaagatagggatagtcttgtcggcttctagaagttcttattctagtccgatatactagtgtcaacgggaattcaacggggaacccaacagggaatctccgaagtcttctccgttcctgctgatcgacagagcctctctcttgggtgatgtacggtggcacccaagcttttgacaacgcgatcttggatcccaagtcccggcagtggctggcggtacattatccagtggagtcaagtttgaccatcgcctttgttccggtcaatcttaacggccttggcggtgaatcgatcctgagtgaccaatggaagcccgtctccgcagccattttatttttatcgaaggaacgtggactggagacgtgtggcgtttgcaacggaaaggggggccgttggctaaaaatggccaataagggtatcttgaatggcagttaggtggagatagttcggtcaggatgccggctgattggcatttagttccacgctattggattcagaccccatatgggccttttcaggcagttgggttcccctatgtggcgctttgcagatcgttctttgtttctcgtggagtgccactctagttcagagcgagaacgacaacaaagacaaaaagtacggagtgcgtatggcaacaataatggggattccttgacacagatgatccgctatttaaagtgggtttagaatatcagggggtttactgccatggaggtactacaggcgctgagttgtatattgtacatttaggggatatcaccggatgatcatttaccgatagaatctaatttatggttaattcacagagtttactccgagactatgggcaagcccgcgagtataagctcacgctagcccaatctacgttgtaagcccaagtatggagtaactaaacctcgaggttccatgcgccctaaacatgggcatgtagatctcaatttgatcctgtaatccggtagcctccaaactgacatgtttgatttcaagaattctacgatttgggattgtcgcgttatttctagggcaagagtgaggacttcaaagcatgtctaaatcttacggataagcttcaactacaagtgccggacgacaacgccccatctcgtcaatgtttgtagacattgtcaatagtggacagaccccgttgttctggttgattcggtccatctcggcataatggagatgctcgtcccacttaatgcttctctaagactccattatagccaactattgagctgacccgccagtctggatactgctgcttctttgacaagtaaactccctaacagggacaggggtagtaagatcgtacctgtagatcactcagttcatagtgtataaatacggtctttctctgtgtccccatcaaagttttcttcttctccaagcttcctaccacagtcattctttcagcaactacagtcactcttttcagtttttatatacctattaatttcacaatgaaggcctctttcatcgctaccgtcgccgccatggccggctctgctttcgccgctcccaccaccgttgttggtgccgatagcctcctcgtcggcctcaagattggcgacatcaccgcggagctcaagctcagcgagatccccgttgtctacaagctcggcgacctggccaatatcctcgaccttcccaccccctcctcctctatcagcaaagtccccgccgtcaagaacggtcacctcgtccaggacctcggagacgaggtcgacaacatcctgaccgttgtcggcgaagacctcacaaccctcctcatcgagctgtcccccgaggtcactgccctcgtcgacggccttggtctcggttccctcggcgctcccctcggctccatcgtcgcctccgcctcaaacattggtggcatcgtctccggccttggctccgtcatcgacggtctcgtcactgttgtcggcgctgacgccggtgctctcctcatcagcctgtcccccgaggttgctggcctcgtttctggtctcggtctccctaccattggtgtccccgtcggtaccgtcattgctaccgtcggccagaacctcaagcgtggcgagattgtccaggaccttgcccctgttgtccagagcaccatcactgtcgtcggccaggacgccgaggatctcctcatcgagctctccccctccgtcacctccctcgttgccagcctcggtctgacctccgtcgccggccccattggctccgtcgtcgctgaggccgctaccgtcggtgagcttgtcaaggacatctccgttcccgttgcggatctcctccacattgtcggccgtgatggcaagaacctcctcatcaagttgactccctccgttgttggccttgttgctggcctcggtcttcccaccattgcctcccctctcggtgccatcctcaccactgtcgctaacaacctgtaaatgcttaccggcatgttatgactctggttgaataagcttgcttgcgtggaggtctgccatcggtatgactttggtactcactatataatcataagaatttattatattcatctatacaatgtccagagtatttgacacataagggcgggtaatactcatagtaattaatttgttcaggcctctaaatccaatttaatttagaagaggggactgcaacggggacagcaggagcaggtgtgagggcaaagttgtcacttggagtagtagggtactagagagcagaacaagaacatcatggggtgactcctaagaagagaaggtggaagcatcaactagttacacattatgtaaaatatcttggcaaggacgtaaaaacctcaaacagacatcttaatggagagagaagacctgttgcattcactggctaagagagagagagagagtaggttcaggcggggaagcaaggtcctatcttcccgaggcaaacggtctcaacaaatcttctccaagcacccggacaagccgaacagttgatgaaaaaaggagttcgcgtcgaccgggggtagtgtaagcccagtgacactgtgcaacgaggcgtatgcaagcacagaggccaagtcgcgaggtccaaatattagaataatcatgacgttctgcaatgcagaacattcagcgattaaactgaatagaacagatactacacatgatctaagccagaggcaaagagagctgaagaagaaagaaaagaagaggaagtcctgggggcagggctaccttcttataggtatcctaagggcggtcggtttatgccactattcataaacaaatgagacaaacaacgacatgggctcgcttaattaaatggtaacgtgatcgtgagagcaggaacggcgtctcttatttccgcttgacttgtttcacaactgtcattcactttggtgtgaggctataatgtttggttcttctgatatcagcaagagaagggctgcaggtatactaatcttcatccccgtggggccccacgttttgtttacagatctacggataatttaagcactctccacctattggttggcacgggatatatgctttgttctttttgaatctatttacaatgaacagtcctagactcagtttgccaagctatgtatttccttcagttataaggccacactttcgcatgaaaatcccgctggctcttattctcagccaacccaatagattcctgcctgaaacgctcattcgcctccatggcactttcgtagtattcgggccgaacaatgcctcccagcggaataagccctgcgtcttggagctgatgaacaatgcccgaaattccctccaagagattcatttcgtctgtatgtctgagtagctcctcttccccgaaatcgactggaagtgactcttgctcgtacttgagctcagcccagcgcgcgacaagtttgatcaagaagttgcgaagagaaaatagatcttcccggtcccagcatcggggtactaaagaaatagggtcttatttcagctcgtgaagtggatcgttgagaagttgccttctgataggatcgtttgtctttgtgacatcatagtaatgctctagaagcattttttcctctttcatttgatcatcagggtatggcgaggctgatattccagcaatcgcggatgagaacactgtaaaattgaatagaaaagccttattaaactgtccctcgacgcatttgagcaactttacacctgtttcaaaagtcagtattgaagcgattgggtaggtagccacttacaagtcgttccggcatctccaccaggtttagcagaggcattcagaagagcctgcaggttaaatctgcgataacgcattcctagtttttcgggttctccactcctgaagaagttagagtaatacgaatctgctcacaagcgtgacatacaaccaccgatatcgttgatattggaataaatcatcttcctcaataggtcctcggtcaatgagaaatcacccgttccatcctccagcgctctccagagagatatcgtccttgcttgtggcatctgggttcttgttctctcaagcaagggaggtgacttgaggatgggaaaaccctgtatgaagtgtggcctcgtatcaacgtattcatctttggatggtgggctgaagactaaggttgaaggggtagtcgtcgtggtgtcggtgagccacacccctgacaatacacattgtaggtatcgttcgtatggcatgttcgtacaaaaggtacaaactgtagtcttgacttttattttttcgggatactagctatgaaacaaaacatttatataatatagcacaactctgtactgtgcttttgcaaaggagcctctatccccatatgttctttgcttgtatcaaattttcatgtttactgccaatactgagcatgcggctgatacattcggcgctagtgcaattctgaaacattcatccatgagattgtctagggaatactacctattatggaaattgcatagaacaagtatcccgaggtttagagcactaattcgctaagatatgttctaaaaatagaaccgtatcagcatagactttgtacctctactccgtacttcgtatatgaagtcggcggcgtactccgtccgtattacctccttaatatgcccgcatgtagcaaatatagtcccaagtaggtatattacaaatcaagtatctcgtcattagctctgaaatacacaaatgagtattattatattgcttatctcggtccaataacctttggtccgtacctaggtagctagctccaagatttgggtccgagcggcctatcagagcgtcgcctgggtccgcactgtagggtttgcccgaataagccccgcttttattctttgggtaggccaatggcggtcgatatatatcgagtaaattaaaggtttatctttgactttctccgccacctcctgccgtttgcctcgtatttctctccgcaggtcggttttttgcatacatccccttcctccacgttgtccccatctccccctggaggcctctttcgcttcttgtacatatatgcccttctcctccctgtttcgaccgtgcgacttatgttttataattgtatcgcaacaccgtcgctgccaacagcgatgtcctcatgtcccttgccgacattgccggcaggaatttcacctcccctgatcgctccggtgaccaattcgcggtgcatactgtagtcgcctgcctcatcggcattgcctggtacaatgccttggaattgatcgttctgtgtttcaccaccttcaagagatatggcgggtgctatttttggtgtctcctccttgcctccttcagtataattccgtttgggatgggatatatcctcatcatcttcaatgtatacgacaacatgtttcccgtggcgatggagctagttgcgtgggttgggatggtaacgggccagtccctagtcctgtggtctcgattgcatcttgtctgccacagccgaaccgtgctccgcgtcactctcgccatgatcattgttgacgcgatcattctccacatccccggggccgtccttgagctcggtagccattcgaacaaatcttctctcttcaccgacgggttcaacatcttcgagcgcatccaattggtcggattctccatacaagaaatcattctctccattatctactcctgggaagctgtgcgactactgaatctccgcccgagaggccattaccgaggtaccctggtccaactcttgatcgtgaacgtagtcatgattatgatggacgccgccgttatcggagtacaatactctggtctcttcgatatccatgtcaccctcaaggccatggtctacagcgtcaagctcaagctggaatatgcgatcttgggcaaattggtgcacatcaccgagggcggcagcggctcgaccccgaccgacctgtcggatttcgtggatctttccttacataatccccgcaccccgcgaccggatagggacacgatcagagagaacccagagaatggctccaacactcgggtgcgagtcccctccaagggctcgtctactgatccgctacgaaggagtctctccgcccatagtccgagttcgagtaacccggactactcttgatgatttcacatgtaataacgacctcttggatgtttctgtacataaaaagttacttagtatataatgacgacatagaccatactctcaccagtcgagtgttaaatctctcacctataataggaaagtaataacggcattgtcagacatcgccacgagcttgatatcaaatcgagcacggtacctcgtattccgtatatcaatccgcaatccccaaacccactgaacccacctatcgacccacccatacccaaatccacacctctgaaccccaactcacctcatcctatgagtccccgaccaccaagcgcaagcacaagacctgcacaagaccaaaccttcgcagaaatcctcagacaacggaacaatccttctctcctcgaactttgtgcgcgtaacggctggggtatctgacgtcggagaaggcgtcgggggaggttattcctgttggggatatagggaatttggccctggctttgccttgtcgaaggtttttgagagggggcagagtatggtagaggttattaggccgcgaattgaggggcagggaaaggtgcgctgtgaatgttcgagtaagctggggcctacatagtggtgaaggtgtcgtaataatgtatgacgtgttggtgatgccggatagtaacgtgatgataatcagaagtactgattattcttctatttcattccacaagtgcccgagttgctctctgtccatttcctctgaccttcattttgtcttagatttgaagatatataacctctcctgtgcctgcgctggtgctacgtccgagtgactcgctcatttgttcttatgctcctcgatagtactcttctagtgaatgtctagcgaatggagatattccattcaaaccagcaacgagccgcctcccgtcctagaaaagttgaatgtttggacatgcttcgttccttataatgcttcctaccgaagtcacctcggaggtccaaagagtaggaaatccatttcctcttcaagcggtaacagagtcttttccttgaaggcgttgcagtactgatcatcatcgaaactcgcatcggggtcgaggtatccttgtaggcaggtcaaaatagcctgggagaaggcagatgacaatctcccatgagaatttttctccttgagccatccctccgctaggtgaagacccgattgatcacccggtaagatattagtgatttgatcatatccgagtctttgctcaaccggacttccggaagtaatttcaagcagcataatcgccaaggcaagcaagttcgaacaggttctgttgataagtgtaggaccaggtcctgttcctggattttggatcagctgcgatgatttcgaaattgagtcctgaagcaacgcacctcgatgaaattctttcactaaggaagggtatcttaagtcgacagacaatggcatgttactgttggctcttgcgaacacgatgtccctcttactccatttagtttcaagccatggagtatggtttagttgaaaaatcgacgctatcaaggtgatggcgagtccgtacacttctgctatgggtagttgggcctcgaattgcggaaggagggcctcgagagatgaagactgctgaacgtattcagcagcggtctttttcaaggaagggcgtgatgccagaaagcccttatcattaaggcagaataccacaaatggatgcggggattgcctaatgactttgcataagcttgtgacatgctgcaaatttgcagggtcgtggtcgtcctctggaactgatatcgtcacacgaacagttcctgttctcgtgctactttagcgtcatcactagagctcaaaaggacagcaaaagagaacccaaaagtgcgtacctcgatgggagttcgtcaatccttatttcagaattcaaccactgagaagacgcgttgcagtccccacgaagacccaatccaaaacaagtcgcctgcgccaccaagttcaagctcgctgcttgcagaggcctcttcgttttctttggtctcaccagccgttgttcgaggagcagacatgcgacatggacagggttatcgtcacaccagtttcgagatattccttggtgtactttggtcgcattctcttgaatggtacccaatgatgcagaaaatttcaacttcagacgactctgcggtgtttcatcctgcagcttgtcagctctagttgcccaggcatcaatccgttttgtacaagtctccaaacgatctagcgcatccttcacgcgatttttcttcatggtaaacttgatcctccttccgaattcgaaatctttgtgaaggaacgaagtgttcgcgatccgcggattggaaacgacaatcggcaggaggtctttgcttatgaaaccctaccttccaagagagtgctcgaacctgctgcgatccaggaatatcgaggcaggccgctatctcgaccaggatttctgacacttcttctatggtgagaatgagtgggtcgtatactgaccctagcctatcgcgtagaccgtcagcgatgtctccttttctccacaattcgcttcgaggatcctccatcatcgtggtttggtctgcaacgtcggctgccttcagtaagacacggacggcttggtcgtaagatatgtttattgtataaagctccctaattaaccttcgcacatgccgtctccaacgaaaaaaatcttttgtgggagctgccaatttctcgtagttctcgagggcagatataagcagaggaatgactcctaggacgagtccagctacttccactcctgtcaccatcttggattgggaggccgttggcgagataaatcaacatgaaagaaacaaggctcttccctcttcccccgatcgagctatgagttattcccaggagaactaagaagttattcccaagggaaacgtgttaacgtggagtctctcaagttccaacacccgatctcagccgcacgtccttttgtcgtggcatcgaccccaccaacacgcagctcttggcgttagttcaaacgaatggtctttttacattcactcgcatccttccgttattggaaatttgattgtgatcaggcattggagaaaacctcggcgaaccgcgtggatacacctttggttccattaggcccgagtcgactaacaagtttgcaactcatcaactacgaaagataaaggtgattctcacgaggtgtacgaaacaagatttcctgaacctctaagatcgaaaccctagccatggatgacatcggcgttctttctacctcttgtctaagttgcttcgatactctgacaagatcgctgcgcacatcttcggatgagttcaagaaacagatgaggccaatagcaattgaaaatgaatatgcccgcttcaagatttgggctggcaacctgggcgctttacagagaggccggcattctcttgatgctagattacgagactcggtggtgctacgagcagccgtcctcaaattcatgggagagttacaagactctttgagaaagagtacgttgtgccacatctatgacacctcctatcatctctagttggaaccccttattgactgttattgcccaggtgccgagatcaccacaggtcttcgcctaccgtacgaacagggtggcgatgccacacatggtcccgacgaagatgctgaggacaacagtgacactagtggcaccagcagtgacttggagtctgcagaactagctgagagactcgatgaaatcaaagatatcatggagcacctgtataagctctccttcaagatacgcaacacgagatatcgttctctcaccaacaaagctcttctgatgaaagaagaggatccacaaaccgggaaagacttgttctcggcgtatgccatcttcgattgtcggcatgtacaagagtcactcaatcgcttgcgcctgcgtccgtcatcaaaggaattcgttactgaacctgcacgaaacccaagtgacgggtgtttcgatgtgttaaatggtggggatcgcctgttaaatagcgacgattttctacaagatcgcttagcaaaagcaatcaccaaccgcagaaagtattttgcatattggcggagacatgctctcaagctctcacacgttacggatgagctagccccccaacaaaatttcacaactctcgtgaagcctgcgagacctgtttctggacctccaaccacaccctcaatctcagggtgttccctaccgactccaggggcaaaaaccctggtttcaggaaccgatttctccttgtatagccatgaattggacgaccagctggatacagagaccgtgttttcctatgcgacaacagcctacgatgttgacggaaattccccagaactacctccacctcctcccgatgcggccacgaagccagagtttgtttgtcagtattgctgggtggcttgtccgtcgagacaaggaaaaggaaagtcatggcagtaagtgtctaagatcattgacaggataggagcatcgttctaatgaatgttagagaacatatccgacaagatctccagccgtacgtatgtacctacgaggaatgctcagatgccgaccgcatgcacgccagtcggcatgcgtggcttgaacatgaacggctagtccaccgccgaatatggagatgcttcgaacacaggtccttcagctccaaatcgaaaaacggcttgctgcaacactttttagactgccacaaaggtctagatgagcagcagatcgaaaacctcctggatatagccgagacgacggtagccgatgacagacaaacctgcccattctgcttctcgattggaccttttgctaaggggtttcacaaccacgtggctttccaccaggaacaattcgcaacatttgcagtaccacgaaactttgacagcaataaagaggcggactctaaaaaatccgaagggattagatcagctggatctttgtgttccgttgctctagatttctcggacggtgatagcagccttgacagcgacgacagcgacgtatcagtgaaccaactcggaaactccctgctaaactctgcgaatttcggagacgctgcggctgttaggctgctactcgagaagggcggtaatcccgacttaggggataataatggccagacaccgctattatgggcggctaagaaaggccacgaggcagtcgtaaagctactactcgagaagggcgccgatcctaccttaagggattatagtggccagacgccgctatcgtgggcggctgggaatggtcatgaggcagtcgtaaagctgctactcgagaagggcaccgatcctgcctttaaggatcatcgtggccagacgccgctatcgtgggcggctaagaagggccacgaggcagtcgtaaagctgctactggagaagggcaccgatccttccttggcggatacttatgggcagacgccgctatcgtgggccgctaagaaaggccacgaggcagtcgtaaagctactactggagaagggcaccgatccttccttggcggataatgatggccagacaccgctattatgggcgactataaatggccataaggcagtcgtaaagctgctacttgagaagggtatcgatcctaccttagcggatacttatagccagacgccgctatcgttagcggctgagaccggccatgaggcagttgtaaagcggctacttgacaatggcgccgatcccgagtcgatagcgtgggcgcctaggtcttcagaatcagattcagaattagacgattcggatcaaggttctgttattcccgaccgcctcgcttcagaggattttacctaaatcaccgtgatttctggggataaatcacgtgttgcagaatgggagggtcacttcacagctgaaactaggcagtctgtgaggcgccatgtcgatctgaaaaagagaaagaatacattcaacgaaacaactaagacgaggagaaggaaagaagaaagtgtaaagtagaagcagccagttgatataaccgacaaacgttgcaagcttcgaacatctcgcttagctatctaacaaagaatctccgaagtaaataatgcaaacagtagatagtcgccgatccatagagtcatagaacagacaaccatgcaaacggtaacacagcccatatcaaaatgtaaatgagtataaaatgttgggagcaattgctcccgagatctaggtatcctgtaggattctgatataatcatggtacgtgttcataactgactacatactacttggtgaatagggatatctatgataggcagtctgggctagcaggcaagacaagagcgacacaataacactaaccatctaagcaggttagctagtaagcatagtcatacagacgacagtaaccatcctgtaaaaccctttcattccgtgtgtggtgtgtaggcgtgtgctctgtacgctgcattctatctgatatgaatgtcccgatatttatccctgcagaaacaaggcaactatcatagttaactagttagttggcactgactaataatgcaatagaggatcaaagatgtacggaaatgggccatttctgttgatactagtactatgtaaatcaaataaactcgatcagactcaagataaagacaaggaggtggatccggaatggaaacgctattctcaatccggtaaggagtgggtgcacagccccacagaagccacacccccttatttggctgtggctgcaagtttgaccttctagaattgtaactacattaagcgcgtcaaaaacgatagcctgtataccgctaccaaggataaaagcaggaatccaattgagtttcttcccctatgtcgtattgaagatccgaagtgttgacgtcaagttgagcagagtctgatatcgcggacccacatacatccatggatgatgatggaacgcgtgtgccaagacttcgatcccatcaaccttggaagttgtagatcttagggtttatggggatgtatgggcttttgggtgggaatctatacccctagctctcggaggaacactaaccttatgcagctaaggaagtggatgacgtgaatctggagctgggtacgtacggggtaccccatccaggtggaggttaatctgaccttacaccttacatatgacacaacccatagagcacccacccagcaaatcaaatatagctgcaacgttctaggctgaaagggacaaaagaaaatcccaacgagactgggagggagcagatgtccgtgttagttgtggccaagctgtgccacgacagagtgacgtcaggtgtcgatcaccgccgtagcagtccctacggaggctctttttatcgcattgggctcctggtggcagggcctggttctggtgtccagctcatcataatggcgctattgtcccttgtcttttatattccgtcatcccttccctcctactttgacttttctttcccttaccacattttccttcattccagtgataccccttgttttgtgcctacataggttcaataaatatagttaattgtcagtgagtgactctcgtttgtcctgtatgcaaacggcatctctgaccctgtcttttagtccatacataatacctcaccccctcatcattggtctgatatacatacttccatcatgtctgtgaacgttcccacaaatcctaaacagaaggagaaggtatggatgacaatgcgactccattgaaaccacactgacagagaatctccaggatatcaaccagaagcttcaattctttggtatctaccatggtaagtccagcttcacatcctccaattgaccattcctgtactaactgtgtctgctatagccttcaagaatagcaagctcccctcggtccgtctcaatctcctaccgccaatggccttgtcacaaatgctaactaggtctcctcccacagaacaagcaatgcgacattgctttgaacagtgtcttgaactccaaggccctcaaatctccaccaaaggagctctcacgcgatggaaaggtccttgtggcagatctgcgcaatgtcatcgacgcagcgaagaatatgctcttggtcaagaacgagggtaacctcctgcaagactttgtctggcaagcccagaggatgtccactggcaatgcggatgccaatcgccctgggctccccatcgacaaggaagccggtcagcaagatgctagcaaggccattgatggcctcaagaccctgggcacgctcatgatcaccaacggagagtttagaaaactacgtaagtgaacttccgttcgcgaatcacgggcattcctaacaacgcgcagtgagcgacgccatgacactgggcaaagacattgcggccgatgcttctcaaaaggccgccaaccaggttcgcccttcgcaggatgagctttcgcagatcgaccaacctgcagaggacaacgtgtggcacgagaaacccaatgtctccaaggatgacctaaagtccaaatttaagaagaacaaggctgtatgtattcctagtgcgctataattcggcacatactgacacttagctcaggataagggaagcgctgcttccgcttccgctggggttgccgaggaagagactggcgtgtcgccgcagagcaagaagagggaattatccgacaggaccaaggcttacttgtccgagaaagttcccaaggagcgtcgcgagcagaccatctggcgcctgaagaagatgatcattgaaatccagggtcatgaagactgtaagtcacccacaatctatatcgacggcaaagatttactaacaaattatgcagaccagcaagccgttgagaccctattgaacatggctgagcaatacgccggacacaccagagacctttccaaggagggcagtagctctgcccgtgacgtcctgaagagcgacgatgttcaggctgttcagtacaatttgcgcactcttatcgaacgctttgccaaccacacctctctagacggcttcttcgaatcgctcaacgccatttaccgtgaggctgagaaggaccccgaactccgaaactggttcaagaacgtcagcaacttgattcggtatgtgaattagatgattttccccaggataaaagctgaccggacatagcaaatctctgcgcgaacagggcttcatcatggaagaggaatgcaaccgccagtggaacgatctttacgacaagggccgttacctcctgcgcgagcgttaccgcggttactccgaccgcattgtcgacgaggtcaagttcttgggtgaccaatttgagcaggacgtgcaaaaccaggcccttgccgagtcgttccagaagctattcaaggatctgggccacgattccagtggcaggcctacctttaagccggatcttcttcgggatctccgcgatgtcatcattccgcaatttttcgagaacgtccgctatgttccaatcccccgtattgaagtagcggatcccatggttgatgttgtaatcgagaacctgtgcctcgagggcgacaacttgatgcccaacgttatggagttcggcagcgacaactacttccgctggggccgcaagaagatctccaacaagagtgataataagatcatgatttccatgtctggtatccagatggatctgcgcgatgttggatactacatcaagaagaaggagggcttccccaccatcaccgatcgcggtattatggacatcttcctcggcggcgacggtctcagcgtgaaactcgctgcctctaccgcccagccgagcgacaaggagcacttcttcaagcttgacagagtggatgtgaccatcaggaacatggatatcaagctgaagaagtccagccacaagctgctcttttacaccttcaagcccatgctgttccgcgtcgtcaggcctgctctgcagaaggtcgtcgaggcccagatccgcgaagccttcaagaagggtgacctctttgccaaggacgtccacaccgaggcgacgcgtgcccaggaagccgcccgtgaagaccccgagaatgcgccgtccatcttctcccgctacgccgatgccatccgagctcgcatgcaagccaaggcccaacaggccaagagcgccgcccagcgtgatacccaggtccaaaccgtcatgaccctccacgattccctgttccctggaatcgagcttcccggcgctgtatccaccaaggccaccgagtacgccgacctggctgccaagggcgcgcgctgggagtcccccatcttcagcatcggaagcgcagccgagtccagaggcatcccatccggcgggcccatcaccaggaagactgcccgccctgctagcagcagcggtggaaatgccgccgctacttcgaacgctggcaacgtcactaacggcaacagggtctccggatcccagccccgtggcggcttctccgatgaggttgataaggctttcgtcaatggcaagcctcataccttgggtgattccttcaagcatggcgctgatggtgtcactaatactaccgtgactaacggagctaacaattttgcaaccgctgtctaaactgtgtggccaaaatcggtatgaatttgcgtaatgttattgtctttgtttcttgacctttttttttccctgctatgatttccccttgtgcactacggatgttttattatttgtactagtagtatgagttaatggtagcctaatacatgatgccatcgttgcctgcgttctccagagtaacctcgagctttgaccaaagctaactcagtagaaacataagtacccagagtcgtggaaggtaaaataagcttaaaagtcattcatcgtcgtctataaaagaagtaaactgaactccactatataagaagcccggggaaggtaagaaaatcccacacattcatatcaaatcacaaatcaaatatctacgtgcttaccgtctacatctgatcaaagtacttctgccaccccaactcgcgcaacttggtacccttcaactccatgttctcggcacgggcagcctcggcatacgcctcgaccttgcgctgaatagccgggtcgaaagagccaagcacacgcgcggcgaggagggcagcgttgatgctgttgttgatgccgacagtggcgacggggacgcctattatgaaatgttagatatagatcgggtcaaagtaaatgggtgtaaaaggagagtaaagtgggaaataacgtacctcgaggcatctgcacaatgctgtacagactgtcgacaccgtcgagtgagctccccttaaccggcacgccgatgacagggagggcagtgtgagcagctgccataccgggaaggtgggcagcaccaccggcggctgcgatgatcaccttgatgccgcgcgaggcagcctggcccgcatactcggccatgtaatcgggcgtgcggtgagcagaggtaatctcaacctcaggctcgatgccgaagtaatcacgcagcagcttgaggcctgggacgagggtcttcaggtcgctgtcggagcccatgatgacggcgacagaggggacgggcttggagggaccggagggggcagccttggttttgatatcggagcgctgggcgcgcatggtatcgacgacgtcgatgaggggctggatcaaggtctcggcttcgtgcatagtcgcggcggtgacggtgacgtggcccattttgcggccaggccttgcggcgcccttgctgtagaggtggatgctggcgttggggatggagagggccgcttcggtggccttgaggtgggagtcgggagttgcgccgccgatgatgttgagcatgatggagggctggcgaagctcaaggctcttgggcgggatgggcaggtcgaggatcgcgcggatgtggctgtcgaattgggatagcgcgcagccttcgattgtccagtgcccggagttgtggattcggcttgcaagctcgcagagcatgaggctgttgtcttctaggaggaacatctccacgccgaaggcgcctttgccttcgaaggcagagacggctttacgagcgagagcttgcgcttgctggttgatggcttcggggacgttgcgggctggcgcatacaccagcttgcatattgagtcctcttggacggtctcgacggtggggtaagagaggacgtcgtccttagtcttgataaccatgacggcgagttcctgtacaaattattagacatgcatggcgtggtattcaactgctactaaccatcttgaagtaagcccatttttccgagtagagcgggcggtccttgagagcctctagggcctcgggaatatcttctttggaattgacacggaagtttccttgatactgtcaacaaaatgtatacccttcggcatcacatatgactcaccacgtccgtcatatgccatagtcttcgacttcaacatcatcgggtagcccaattgctctccaatctgagccaattcctcgggtgtgttgtccaccagctcccggtggtcggccatagggataccatatttgcggaggtgctccttctggttgaacttgttctggattgtccggatagcctgccagctgggttccacccgcaccttcgatgcaacctcctcgagagcgtaggtgtcgacgtgctcaatctcagcagtgatgacatcgcaagtctcagccagtttacgcacggcatcaggctccttaaaggagccggtcacatggccgtcgtgcgaactgatctgcttggcaggagagttatcgacgtccaggatattgacctgaatgttcaatcggttggccgactcgacgagcatgcggcccagttggccgccgccaaggattccgaccttaggcgagttccacatgatgtcggatcgaaggaataaatgagtcaattgatcgagatatgtaaaagagatcgacggtgcccctccactccgaaaattcgtggagagtcacgtgtcgctatcgataagctcaggccaatcaccgattcgactgccgcgccttgtcgcagctccgactctctgtttccccatgcacagctactgaacaatgtctctaggtaggttgacccatcacggtcgcatgatcagtctcagttgcaataggccttgctgatatcaagattacagacgaggaagctctccaaacagccgccaatggcggccccatggatttgtacgtgaagctggcatgtcaagatcccaaaacgctgagactaacgcgctgatatagagcaagatggaacggcatggctggtccattgattgagcgactggaatacgtacgctatacttcgatattcctgaccgaattatctaaccagtagctccagatcgtatacaatgtgtttcccatgcctcaagcgcgctccgaacccatcggccagcaattatttcccaaccattcttcccaggcgaaccccattctacccgaaaatagcaataaggaaaacacatcccccgccgatatccaaacttcgccccaagcgcgaactgtctctcccccacagcccgcgagcgcgggtggccagcttccacctccgcttgcatttcttctgagcgccatccgttcatcgatcaaaactttcttcgaggagaaacctccacataccatccagagactcgcagagctagtcctctacccgaccaggcactataggacgttacccgcatacctacgtgctgttgatcgcgttgtctcagtgacaagctccgcagatgttttcccatttcaaacgccggctgtcgcgattgctcaaaccaacgggatactgcttcctggcgatagcaccggggtatatataagccctgagtttgcccagggtcttgggagcgatgaatctctgggtggtgcactacttactccgatcccgtggttagtcaacgcctcgttcgaaggcgaggactccaatggcgatgcaggtatactagtcgatggtactttaccctataaccgagccactggttttcttttcactaatgttttcgcataggcactgaagctttacctacacagcctggggaacaggacaccacaaccctactatcagtcgaaaccgacgaaacggttgctaccgcctcaccagagctatctgacgaggttcctcacgcccgtggtccaatgctcctcggcgtggaagacatgggtctacaagacggtaaaggcgtcgaggtgcgtcttaccgcagacggtttggatggtgccaccgatgtccctacaactgttactcctaccatggcaacggaacaacaggaaaaagccgagtcaactggtgacaaggacggtgatatcgtccttacggacactgaaccgaaagaaggggaagaagccaagaatgaagcagagccccaagcaggaaatgcacggtcagaacccactggtgattcatcccaagcgccggacgccgagaagacagcataagcgagttctttttcttaatatggatttttctttttgtctgattttcttggttcatcctggattctagcatcatgagtaacgacctacaagattatatcgattgattttcaattaagggcttttgcaatgcctatgttctctatataatagctcaagcttggtgatagaaatagtaatggggctgcgactaatcctgaagcgtcataaatccaatccgttatcacctccatccttaggacacagacagttcataatatgaaatggtgctagcaaaaaggggaatcttatcttccagaaagagaaaaaccttagtgatttatactaactatctgagacatcaaatcggtctcaattagggcaagcacgctcatccgtacctgacatgatcaagacaatatcctacctcgtggattttcctgaggtcttcttattcagcactcgctaaagacccctcagtcatgtatatatagctataagatcagatgcattatcgggttgattctctcacgtatcgtctgccagaaaaacttgtctcctgtgaaaccttaaaacaccataattcacctgcaacgttaacttgaaaatccaacagcaattttactcgcgagacaaagtcgcatatcaaaagtccacatgacgctgttgtagtatacagccaagcccgaatgcaaacaaaacaaacaaagaactaagcattagccacaaacggccagacaaagaaggcccagaactccgccggcaaggtctgggccctcctggaaccgcaaaaaggtagaaatcatttaatatacgggctccggtctagacctcacagcttatttccgccctgcagttcgtctacccgagccgtgaaaatcgggtcgggaagggcgggtgatatacacccaggtgggattaagtggggatgtatggtgcgtcggtcaattgtatataggatttgggtgggggtccgccttggattcatatatgaaataaagcttacgagactagcactggaacgaagacccgacacagatgagaggaataaaataatatgttttgtaaatatgtacctgacgaaacaatctctccggcggtgaaatggaatgcatgatgagcccacggtggatatcgctgacgcatatattgtataaagtcgcacgcaagtcgccacccaatttaaagaaaaccaacgccaaacctgtaaaggtgggggacaagtgcggtcaatccgcgaagagtgtagcaaaatgtacgatttgaattttgaacctcgttatagacaagtgggaatcgtgagtcaatggacaggcggaaaggtgaagtgtagaaaatagaagaggagatggccgggtttagccaggtcggcccgcttgcacggcaagcatgggttggggttgcgagtacatgcgctgccgttttgacatgttggggttatcggtggcactgcccatttcggacatctgacggcgatgcggggggcgtaatggaggcccggttggcactcctactggtggtgctgggtactggacgccattctggtcaacagcgtaggcgggtggaccggtaacgtatggcccttgaactgccggcatgttcgttggaacagcctgcatattttggaattggttgggcgactgccagttattcatcgatccagcgggcgactggcctggagagctgtcctctttgatcgactggtttgttgaactttgagttgcagctgccatggtcacggcggcggcggaaggtcgtactggctccatccctgggttctgtggcgaaatcttgagatgatccaaatgcctttccagcatatcgagaagacttttgcgggtgaatggtttcggaagtacatcatccattcctaataagggttagtggaagacttgattcaattttgatgttcgtcttaccatgttggaaatagagctggatgtcgtcgcttcggatgttcgaggtcatggcgatgataggagtgcgatcaaattggcgaatgagatggcatgccgacacaccgtccaaattcggcatgataatatccattagaattaaatcgtattttgagccaccctgaattttgttcacagcctccaggccgtcaaactagaggaattagcaacgttgtggtcaataggacagactgatgacataccgcggtatcgataacacacgagaaagagtacaagaatttaccgccaatctgccgacaagtggcatcgtcttcaaccaagaggatctgagggctgcgcacccagccagggtccacattcgtgctttttttccggttgtcggcaaactgccgacgagcatccgtatcgatctcctgcttggcgggcattgggtaaggaacattgttgatatgctcgctgtacatgggatcgatgccgtttgtagcgcccacgggatagaccacttgctccagatcgccggccattttagggtaagcaagtgctgggtttggcggtacagttgccgcgggacggagggaaccatttcgcgcatgcggatccaagttgggagttgacacgacggtcttttgagggtcgttcatcggatcgacgccgttcatattgaattgtaattcggcgttcatgtcattcaggagcttggaggcttgctggaggggcgatgagggttcatcgtcaactgcaccaacctgagaagggctcattgtcgttccgggggcttggaaagtcacggccttgctatctcgacgctggcgcgcatccaccgaaagcaagtaggtcatcacctggtgaatgacattctcgtggttcagaaccgtcttctgcactcgcatcacttcctgtagcatgagctggtgatccaccgtgagctgggcatatcggtctgatagatgttggatctgctgctgttgcgcgacaatctgctggttaagaagatcaatttgttgcgtggggacggattcatcgctcggttgagtttgttttcgtggcgcgggcgcctttcgtcgaatgttgtcgagcgattctttgctgtttgcgcggaactctgggtgcttgaattcccatgcctgttgttatgtgagattcggtccaatcaagcttcaaattgggaggcctacattctgcccgtatggtgactggccattttcttcattgttttgtcgaactttgtggaaatcgtacttattcagttggcggacgaaactggcaaagttgctgtgtttaaagtgcttcggcaggatggtcttggtgaatttctcgcactggaatccgagttagccacgcgtcaaagagaccgaagctggacaaaaacacgggcgcattacctctaatacgacaaaggaatccccttcatcgccccagcgcacgatggacgaataggtcgggtcctccagcatcctgtggaaaagatcagcttaaaagaccaacacggtcgcaggatgcgtccgaagcgaagcaagacttacttatacagcttgcgtacctatccatagtgttagccaagatctctcacagccatagcggacgactaacaaaatcactggagttcccagcgggggcgggattggaagaggtctggccaccgtccatgctgggctagacgggtcgcgaccggtcgaacaggcaggtctggctggtttcgtcccaacgcggataatgtcaggtctaatggcagttcacatccaacagcggaaaacaagtagaggggatagaaagccagacctgtcggagggtgggagaagggaaaaaatgaaataataacgggggtacggtcagttactttagcggtagagccaagtaccaaagttactgtggaggtactgccttggtacattcaatggactgcgatgtttcagaacgcaccgtgggcttcaattgtgtagggctgctctttttgtttgtattatattattctccagcttctatttccccatgcaaggaggttgaatgctcccagcacccaggaaccaacgaggggcagaattccagcaggtcacaccgaacagagagaggtaccagccaggtattgtatacaagttcgtgggaaaaaataaaaacttcaccagatcctattcgctatcaaaagagacatgcagcatgaattatgggctgtcagtgcgcacgagatggaggggaaagcaattcccccaatgatgtctttatatgcgcttgatatcggtgatcagccctgtcatcgtgtcactgtctctcccacttttaagattaagattaaagatattggatatgctgaatcttatgaatatgcgatgctattacgagtctccaccgcagaacaagaactaccccataagactttgctacgtggttatggctaaagccaccgaagcacctcgtactccatagtccatagtctagatgctggtgaacagcccaacgcacgagtttgcaccgtagcacattgtcgtaaaagcgcaaaatcacctccatcacctgagcctcgcgagtcaatcccatcttcacgcttgctgtgttgaattacaacgtcgaagatgactgcatccttcagcaggggtgttatgatccaccgtgtgacggagcaaggatccactgcgtcatggcggaataggatgcgacttcatatcatccgattcgaaggtagctagtccgccttgttcttaaaaagtgcttctgataagtgacagctcatataggaggtacctgcggtatagcctccgcaggtcgcactggtatccacaaggtcagtgtctgtgccgatatcgatgatgtgcattaaataagaagtaaggacgatagctaggatggaaataaacaagcaaaagcatagacatagacatacatacatatcacataggctaaagagagttcctaaaaatacatgcaacggccatgacgaaatccaagctcgacataccgcccttccaaggttgctcttctccgcattattccaaacacttcttcttctcattccttggtccaatatataacttcaatcccatcctaactcaattaatcccaccatgttcgcccgccgtatcgcaaccaacgtccctcgcgttcgcgcgcaagcttccctcttccacagcaccgcgcccgcgttcgtgcaaaagggcgacgccatccctaacctggacgtcctggtcgagaactcccccggtaacaaggtcaatttggccaaggagatcaagaacaaggctgtcatcattggcactccagctgccttcagtatgtgaactctctactgtgatagataggatccggactgacattcttaaggccctgcgtgttcaagcacccacgttcccggcttcatcaaccaccccaagctcaaggaggccggtcaggtttttgtcatctcggtcaatgaccccttcgtgtaagctatacatgtcgaattgcagcgcggaagcgtgggaacatttgttgacgcaactatcatataggaccaaggcttgggctgcttcccttgatccttccggcaagagcggtgtaagttgccattctttgatgtatttttatcctagcaagctgacattgtatttcaacagatccgcttcctgggtgacccctccggcaagttcaacaaggcgctcgacctcctcttcgacagcagcgccatattcggcaacgaccgcagcaagcgctacgttcttctcgtcgagaatggaaaggtcaaggaggctttcgtcgagccggacaacaccggtctccaaggtacgctttcttctatcgagggtgtcgttctatgctaacatcacacagtctccactgccgagaaggtgctcggttaaagccactaaatagagctgcaatctccttgcaaatagtacaagaccaatatagcatgcggcacaaagtttattttaatccttgctgcacggcactttgtagcgcaggattttaatgtacaaatattccatcctttccaacccggccaacgcctgaaccgatgccagaattaaataggcaagcctgtagttgaatcaatcgagcaattaagaatcaatgccgattcgttcctgaacaatcttcggtctggtacaatttcttccatatccctctgggacgagtccatagtccatcatatccccaccctagaccaattactgctgcagagcctgccactgctcgggggtatagcacttgggagtccaagcatgaatagcagcgatctcggccttgagcgcggaattgacgagccggtgtcgcgcaagcatagtcttgctctcgaactgaggtgaaacaatcacagcctggaaagcctgtccacagccacctaaatcaacccaaaaagacagcacgtcagcgggagatcaacggagccaaaaaaaatatttcgacgtcatagcgccgttctcattctaaacttcaatttaaatttcaatttccatacccgatagatcctcaacctcgacatgctgcgcctgcagcgcttcagtcaacttgttcttcagcgagtcggtggtgattccagatgtgtcggccatagcggcgttgaaggcggcgtaggagcgcgcggtgagggaaaatgaagaccgctggatattgtgagggcggagaagatagcggcagcttctgctcaggacggtcaaggaggatgtgcgggagaacatgaagtatatggtcggggaggagaggcgagagaagacgagagagggggataaagtgccaaacccgaggttatcgcgaagtatgggagttgtcgctcaggtgctcttagtattacaaattcagagcctccggtcggctgtggctggtgggttcacgtgtgtggctcattctcgttttctgctcttcttcggtctgcaaccctcgcttggaacatccatctatgaattttcttcgtgctacacgtcgatactctgccatgtctatgctgaaatatacagaatgctcgccattcaccaatgttgtggtgagcgctatgagaaagctgtaattcaccccccgcttaatccccaagctccccgcattgcatggagagcttcatttaacctctgatatgtagatacccagaggcattggcagacaagagcttcgataatacaggatgcaagttgctattattttcaaatatcagttgattggcttctgcaatggactaacacgctcaatgacagtgctgctcgaagctcctttcgacaaatcccggatacagaaaaactcggtcctcctcactattgacctcactaaggccgtagccgatgaagccattaaaaaccaaaactcggttatcgtcgcataccgtaagacgcatccaagctagcatactagcgattggaccccaaacctaacacaacaccaacaacacacagacccaatcatcttccgcggcctgaaatccctcaccctcgccgactcccaacaaagatccctcctccacctagcccaacatggcatcagcgtctactccccccacacagcagtcgacaccgtccccggcggcatggccgactggctctgcgacgtagtaacaggcaacttcgaacctacagccacacctaacgccaacatcgaaaccagcctctcaagcctgtacaccgccccaacctacccagactcacccatccccgccgttcgcgggccctcctcgcgagcgctcccgcacaccatgaccacaatccacccatccccgcccgctacaatcccagaaggcttcgagtcagccggtgccggccgtctggtgacattcgccgagaaacagcccctcactgaactgatcgacaatatcgcgcgtggaatcggcctgccgggcggtatccccatcgccatcccgcagggccagtcggttgatgctatctccgtccgcacagtgggcatgtgtccgggctcgggctcgggcgtgctcctcaagggaggcgaactccctgatctcctgctgacgggtgagatgagccaccatgaggctttggctgtcacggaacgtgggtctgtggttatctcgctttcgcatactaactccgagcgtgggtatctgcgttcagtgatgcagcctaagttgctagtcgaagttaagaagcagtgggaggatgctatctcagaatctatctgggctattcaagctagtaaaaccttgggtgaggctccatcggcggctgcagtccagattcgggagatttatagacgggaggaagttgcggttcatgttagtgatgctgatcgtgatccctatggtattatgattttgcgcggtaactaggcgggctcttctgtttcgacatctaacaatactacaaaacgaaaagcgcaaaatatagtcacaattagagacattactcaacacactagggctagatctatgcagtacgagggagtctggtaatatgtcaagaaagtggttgaaatgagaaggatatcctagtggtagacaatgacagaaacaaaaaaaaaggtgtcttgaggcaagagagaacacaagacaagatgaaggacccaggtcaaacatcgaagaaatgcaggctaccgaggacatgaaaaagaaagcgtaggtctttcagttaagccttccgttcatggcttcaactagcccactattcacggatgtagggagattgtagtgagtatcgagcaacgataggtatagaaatgaaggaaaggaaaaaaatgagaccgggtaagaaccagacgaccgagccccgaatgaccgaatgacagaagaaacagaaagaaaaatgagataaatggtatccgcgtgagtggccttgtcaggaatgaatcaagaaagaagaggtccacgagatagtgactacagatcaatcaggctgccgccaccgcgctgttgctgttgctgacctgcccaggggttgttattggcaggttgctgctggaaaccggtctgctgcggcatgcctgtgaattgttggccgaagaatgggtttcccgtaggagcagcgtgtaggcggtccaagcccaggccggcagaattgacgaatgtgccaggtgttgtgtgctgtgcggggattcgaaggtctccgacatttccgaaggtatcctggccttcgcctgacccaagaagggcgttgagacgagcgtggtgagggttgagtggcgacgtactctttggtggctgtggggcttggaagccggcgatcgggttgggctgagagggttgggcgaacagcgaactttgaccatactgcgagttgttctgcgcaaactgattggttgcacggtcctccgacaaggaattgagtgttggcgggcctgtttttgcatggttgttgaattgtgtttgagtgcgctgagcgaatgggttgtttgatcctgtcggcatgggcttgagggcatcagcgggctgcagttgctgagagtggctgccggcccatgggttattgctccctgccgtctgatagttctcctggggctgttgttgttgttgctgctgctgctgctgctgctgctgctgctgctgggagaagacatccgcaccgtaagggttattcgggttaaatgcggtgtgctgaggttggagagtggcctgcggttgtaaaagattgttctgttgctggccgtaagggttctgatcaaaggccgagggctgcgtctgatagccattggcgtaagggttattcatgccggtgggctgattctggaatcctgtcggctgcgcatactggttgttcaggtagccagttgacagaggctgctgcgcattgatcgggttgccgaaccagtccacagcaccttgctgttggtagccctggttgtagccggttggctggacttgagctggggctggggtgtcgtcgaagagagattgcgcgttgctctcctccaattcgcgctttcggaggtcctcctcttccctgctgagcttgatggccttggcaagagcctcgtcgtcctgacccgccattgtctccttagcccgtcgcctgcgctcatcctcagcttcggccttgctggcttcaatagctaagtggtattcgatgtcggagtcgtcgtccccgttgcgtcggcgtcgctctctgcgcggcggttccacgggggagtttccgtatccttcgtcgagtccgctcacgcgagtcttccagagtttgcgatccgatcgttcactgcgcaaacgatcttcatccagtaccagtgcagttaattcctttgctgccacgcgaactacataacaccaatctgtcaattttgcgacatctctggttttcaaggaccaacttaccgttttggccaacatcccttgcttcctcgtcgacgtatgtgaactcgcgcaaagtcttgataatatagacgtttttccgggcccacgttactaccaactccgagccttcgtggagacaatagtccaagaccttcagcgacttcagcacgtggcgccagttcttgcccttatcgttgagtcgcttgtcaagcatgtccatgatttcgtagaactcgttcgggctattatgcaaatggcattagcgacgttcacacagttggtcgcagacacaaactcacctcccgaaagtcatggcggcgatctcggacatctcggtacccgtagggccccaggggtcattactagtggcttgaaaagtaagttagcgacttggtcacaatgtatgcgaaatgcatgggcgcattgcagcaagcaacccccgcaaaaaagacaggggcaagcgacaacagcggttctgcaacatgcggccagaactcgataatcggcgaaaaatgcgatgtaaagaatgtcataccatttcggaccttgacctgcactgaggaatatccttttgtgacgtttttaacgcttcgtacgactttagacatggtggcggtgatgcgacggtcgcaagtttaaggtggatagaatggatcgtaatcggtcggaaatcgatgcgagcagagtactagattgccaagcacacacagcctctttctcgtgtcgcggcccaagatggttgttaagcgtgttactcctctgaaagggacaggttggtctatcggtccaaaggggtcaggggtttgagctttgaagctaaaagaaagattggcaaacaatagtggatcgtcaactgatgaaagatgtaaagtgaaagagaggagaggggatggctcgaacggggggaatcagagggcttggcagtgacgaagcagtttggaccaaacttatactgccattgtttaagatctacacttggaatttcaggcttgaaggtttcttagttcatttatcatcataagaagccctggaatataagaaaaataagttccaataccacttgaacggtctaacatgtatagtgtatgtataactacgtcgccctcgtggccggaggtccggtctaatcgccgtcatcttactttttctcctttttcccctatatatagcccagaataagcaattatttatctgacctctacatattgatcttgcttaacatattctatcggattatgccaattttggctccaaagctatgtagatataaaaaaaatggcatgtttcccgccacatgtggcggtctgtaggcgagaaactggtcaggcaacagtcaagtagaaattacaagatactattggtacaacggtcatatacattttagtagtatgtattgcccattgttgtatattaaagtctcgcacggaagaaccgggctacgtcattgctgttctagaatagtacaacgctccgataggtccacattggaccctgtcatgtgatacataccccggaagaaaccaagtctgtctgtaagagactcaagagagaaaaatctggggatctagggagatctacggtaatagaagaggcaacatatacctggccagcacaagagacctttgtttacgcgcttgagaggtatgacgtcgcgttgtaaccatctgcgaggacctcgtctggaatccatggtatcactccctcatacggattttaagaaatctatcgccccaagacgagaatggatgcattcaggtctccctgtagattcctacattacatccaggaacagcttgtactctagtctaggagttcaactcggctacgctcatgtattccgtgggactcgtcaagtggcaatgagagccacgacttcaggaacgtccacgagaaagcccggttttttgtttgatgcagacctacatggacctcataacaatggtaatgttatgatccctgtggtaggtgaagcagcatatgctacggcacactctgccgacgctgtctcgtgggctacggtgagatggtggtcagagagatggagaggagagaagaagaagagaagaatagaaatggggggaggggctcttttatacacccaacaaaccgtaccttccctgtcatgtcattgtcacatgcccaccttcttgtttacattgtttacacaggaaggagccctgaagccaatgtcgcattatgttaattccttatagtgcaattgaagtcctagaatgctatcctctagctatcccatcagacagagcaccagcaatactctcaataaaccctttcttctgcatcccatcgacccattcactaggtatagtgtcaaacccatagaaagagcctgcaagacctccataaacagcccctgcagtatccgagtcaccacccagattgacaactgccaacgccccatccttccaagtatcatacttgaagaatgcccacagggcacactcaatggtatcaataacccatccactactcgtcatatcacgaggctcctttgatttccagtcgctgatagttccgtatctagatggcgacaagcgctccttcagaccagcatgagtaaatgggaactcagagaccgcttgatagagctgctccttcgtctgacctatacccaatgtatatcagcgggtattcttcaaagaaaacatcaccaagaaaccaaccattcataaccctacacaccaactccgtgtacgcctcacaggcctccacacacgcgagcgaaggatgggtaatccgactatgcgttctagcaatctccctcgccagtcccgaatcccgccagtaaaccaacccaatcgggacgatcctcatcaagctcccgttcccagagaactcatcgtgatccaatttgctattgaccaacgcctgggccacgtcgagttcacctttgtctatgccacgcttcgaccacagcttcagcgaggtgcgggtggagcgtcctacgtcccatgagcggttgattgtgctgaattggcctttggtcagccatgcgacaaagttgtggattgctagcgtgtggttgtattgcatttgggacttgttgaatgagcatgctagggctagtgttagagacccgtcgtccgaataggatcttgtttatgttagctacgaggtatttcctgtagttagatggtatggctgggatgggaactgaccccgctggttgtttccaggatcttaggcatgtgatcggctcgaatgttcctgcggctttgaattggacggggccaccgagggcgtcggctacgcagacaccccagatggcgccttgggcgcgagatttcgatgatagagacatgttgtaataatgtgataatgtgatgttgtgatattatgatgttgttatgtttttcttgcggggtgatttcgtttctaaatactagcagggaagatccttggaaagtcagagtcatcaggacgcactataggtaaaaccgtggcagaacctcaataataacatggaaacttaaatataaagccgtgactcaatatgagtcttgggagatgcgttgtatggagtacggagcctcattctaggtgggcctgactcacctcggatacgaagcggtctatgttgtatattatctgtaatattgggacctgtgaattactatatgcggttagttttgcctctttgagtttagcgccccaatacgctgtcacgtgacctaccttcaatgccgccgacataaagacactgaggtggatctcaagacatgctaccaataactggtgtatttctcgttctgacaaactctgtcggattaaccgtatccgtaaatgtatgcgtccaatcaatggtttcaatcagtctgtatttctgtactggctcagctgacaatttatggagcctgattacataaactaaaacataaacaatgcacattctcaggatcaatagatcctccggtatccttcggtatacttactgacatgcgtgaccacaggtcatgtgggcccgcctgagagttcagtagggttagcagcctgaggccacccgccaagagttcttatgtgccttaagggtttcagtaccttaccacttccctcaacttacccacttctctcttaccagtaccatactacttttttattagttacataaccaccaacattacttgtcatataactaccgctctcatggtgaagtacgcgatgcatgtaagtataaccctatgagatgatatgaaaaggccccagaaaagatggaaatacgatagattgaagatgaaactaacagttattcgcattcagactgcataccgatggtactgcaccctgaaatcgagggagggtatagatctccctcaactaaacgatcccaatgtgagcatactatttatctactaataaaatgaataaaactaatagagaatagacacagggggaaatcgatctattcctcggcgagcgcttttgtcgttatgccaactgcccgaaagatgtgggttttctttgacatttccttcatttctttgttaaagtactagtaaaaaactaatactaatttaccttacagactcctgctacgtctaccaacaatctcaggaagcattatgcagacaagcatactgatatgaaattggcgagttcgggtggtcgtccaactttacaggatgagcatgatgccgttggtatggtattcttctactacttttttactagtattctgacctctaatagagttctacattgcgatccgggatgagtatgacgcgaatgttgctgctatagtacaagtgaagcctgagcttcctcgtaaggcagatggcactgtgagttacttctaatttactagttttgattatatactaatattggaatagcttcaccttaccaatatgcgtaaggtatctaaggagcttggtggtcaggttccttgtgagccgtgtaaggatgcaaatgatcgtcaaggtaagatattatcaagaaatgtatctttttactacttattaactagtattaggttgttgccgtgaagctaatgctgaccggtgtgataattttgagctgtttgtaactagtgctgtagaggaggatgaggaacaggataacgaagagggagacgaaatggaagagggagaggaaatggaagagtgatactactagccttcctttctttactggtgaagaactagtattttcctactttggctgctattggtggagttcctgcgaaaggttgttattatgcttatcctgctttttactagtgtttctctgtataaaaaataaaaaaaacatggcgtttgccataaccctatagtgaaaagtagtataaaactggtaaattgaagatattaaacattattgtatatgaagtaaccctatcgcaaccctatctctagagagtattttccctttcccgtagtactaactgtctctcttgttgtttaagatcctccctcaattttttaacctttttcctctgatcttctaaactctcaatgctattctcatcctggctgttattgccagtgttgactgacgtagtatgccgaagattagatacagcgggtgtgctatcaatagtcagtaattagtatcatactagtaaagagtacatacattgcacgacttgttgaacgaccttgtgagctgcttgctccacggccgcgtttagcctttttggatcctgcccgaggaattgaatgattgcctgaagagttaaactcataaagctctttatcctcaggggccacatcatcatctaggacttggtaacgtttccgtcgcagagattctaattattattagttagatgccagtaaataagtagtaaatatacataccctctcgctgtatactcttactaaaccgtgtctgcatatcatctgtatgataggaatgtctgatatcgaaagcttcacggctatggtattgctgtacgtcggtttcgtcgaggatctttgacctaaatgaatgtaagtaaatggtagaataccagtaaataattaatattcactcacttcgtgactgtaccaaggagcgtatcctgtgtacccatatgataggatttatagtggctttgctctactgcatttgtatgctttcgcgcttcctcgaagaacatagagtctattggcgagcatgcattacaaagcccagctgcaataacatcgatcttcttatgctcagcccaacccttaagctcagggttatgcgctataaatattagtaaaatactagttttttcaaatggaaatatataccgataataaggtcagccaactcctaataattctgtcgacttttacagtccattaagctggctagtcgacttcttccctctatatgtgagagatcttctgggtcccggcttgctggcaccaatttgttaattgtacgtatgaagtgtatcttacagaagataagaacattcatagtatgccatctccaaccaagatcccggttattggttttctggtcagtctcctggagcatttttccaagccctaatactagtaagttactgtaataatagtagtaaaaggtataatacttacctgtcatttgttttgggcacatatcagtgataatagaccttattccactaccatgtagatagtggaacttgatcttcttacctatacagcgctcgacgagattaaagacatttccaaatataaaatgatacgcttttgtagtctcctgatctgtgaaaactcggaatagcgtcataactagaagatattagctttggatactgatataatagtagtaaaacaaactttttccatgctttgggacaaatgttgcgaagataacctcgttaaaaacgcctttcactcgcttatatgacatatcaacttcgaatgaatgtaatgaagcaaggatctcgagctgttcattaagggcacaaaatataaaggcacctttttcattatacacaatctcgcgtacatagagctaaaggataattagcatagtagtaataatatactagtaaaacgcacctttatagccggatttttctccatctcgaagtaaacacctactaaatgtctacccattggatagtcaattgctctcctttttgtaaggaccacagaaaatcgctctttatttgcaaagctctggtatagttcagacagggtttgagcgccgtatctggcggcgaggtctcgaaccccatcactccgaagaaacgcgcctatagatactaattagtatctaataaaatagtattataatactagtaaggttacttactaagtgtaagatccgatgtttgtccccgagataagagattccaaagctcttctataaggtcgtatggtggcttactcggtggcgggggcgggtggttatgtatccctgcagagtaaaagatagcatatggatgcttctctatatcctttggcacaaatgtacggaatttaactgtgcattgtgggaattgtctctggatcgcaccgcgtccgcctaggtgcacaacatctataaaactagttagtcaataataatatactagtaatatgaattcataccgcaaaattgggctcgtgagctagtttggtagattgcagtgtatacttctgtggtaacttccctctgttccttttgaagaagactaatcagaagccctatatctagcctgttccgctttgtatataatgttgtaaagtaatgattcgtgtggttactagctgagccgttagaacaacgaacgaatggcaattcctctcctactacattctagttattagaggctatatattagtaaagatatagtaaaaagaataagaacgaatttacttacctggtggttgaattttccgtagaccatttcgcaggtagcgtctgcttttttacaagcttttctctccaaaaatttctgtcgaagagcatcgtagaaactaaatagttgttagctactaataaaatattagtaaaataggtcgcatacgctaccgcttcacgttagggttgcgaatattggtatgactgtcgagcatccctctttatagagaacatacgccctacaagctcttcattaacctctgtatgggagaggttacggagatagtcgttaagatgaacacagtgcttcatgccggaatagtaagatgctgtcttcgtgacttggcaaccaaggaaggagcagtaaatatcactttttccgccatcacgcctactagcgtactggacctagtaaaatagttaataactagtataatatcgatgattatataacaacttactagattaagtgcatttttcttctcttatgaagagagatgtcggagattaaccacatatgcatagcctttcggatgagtacgcggatattctggaaggagaggtacatattcaatctctgtagtagatattgcgtcgtgggtagcttctgttaggggagttggttcatcttccgttccctatttgaaaaatattagtaacaaaccagtaggaaactagtaaatttcttcaaaaacatacctcgtattcgttgcgctcatgcaggatccgatcatcggatgcattgtaaagctcgacatctgcctctgcaggctcgtctggttcaggaataggctcggcctttataagctcttcaagcttatgatagcggtgtttccaccaggtagattgataatgcgccatggtaactactagtaaacgaattggaacaatggtttgtaagtagttatacgtgcatatccaaagatatatatattcgatgtagagttatttatcagtaattaggtagtaaacaactagtaaataactagtatacaagaatgtatcccttgtaaacataccacatatttcataccaaaacgggatgatctaatcaaagataccgtacatttccagaccaaacagcatttacataagcctaaactaggggtatcgacgtgagcattgaccgcctgaccaacgtgaggtctcaggcgggcccacacgacctgatctctcctgacatgctccgacaaactcttactgccttaggcataaaatcccaaaaaggcttagtaccactaaggtcgcaccccacaatattttaactggaccgaaccactttccctttctctatcatacttctatcctcagtgatagattaccatctactttctacttcatcatggctgagcagcttgctgagcagattgctgctgatgatcaccacatcttgtctgaattcgaagacccagaacgaaaagccctcattgcgcgatttgttgagagtgatcccacgagattgagtgaggtaccactacgtaactatctcgctttgtggttctcagatatccaggttcttcgcgggttggtgtctccccataataccaacgaggcttttgagcgcttgggtgtcttcaaggctaccgtgaagtcaatgaacatctacgatgtagctgggacttgtaagtacccccagaaaacgtgcaccatgacaccaaactaaccggaactgcttcatataggggctggaaaaacacaggctaacaagactggcgacaaatctcacatcagctccgtctattcatcttcttccgctgctacgcccgcttctcctcctctagcgacggttcgttccaacgtgctctcaacgcacggaaccactgggagctcaacgccaagggtcccgatatttcggccccgtggctcggtctccccagctggtactttgccgcagcgcgaggcagaccctaggtttaaagtatgtttttcaaggagatcaaagaggaaacaaaactgatctcatcgatttttagagcttagaacgggataataaacaatgtgtgttaaccaagcgtggccagcctaccatacaaacagcacacattgtacccaacaagctgaatcaaacaaccaaccgtcaccttaccaagcaggattgttgggcgtggcttgatgcattctggggtaaagaccgtgttgatcaatggaaggcacagctgctgacaggggatgtgatcggaactgagcgagtgtcgaatttgatcacccttgaaatgcaaacccatgaatattgggaccgcgcctcgatcgcattccgtcctgtgtgggttaatgctacaaatacagagatgcatatcgcattccactggcttccgtttgtcaaagatggaccattggcaattcacatcaagcagaccgagcttgtaccgacccaggagcacatctttagcgacccatactataaacctcgtatgggccctgggatgaataacatgcttttccatacggagacactcaagccgatcgtctctggctatgttttcaagatgtccaccaccaacgcaaaggagcggccactgccgtcgatggaactactgcaactgaagtggaacttgtcccgcatcgctgcgatgcagggggctgccgaggacgaagacagcgattacgagtccgacggaggctctgttgccgttcccgcaggtcctagaacgccagttagaggacggcgcatgtctgatgagaataggccacccttccgttcctctatccaatcattgtctccatcaaagttgcagaatctgtcgttggaggatgacaacacatccagctacctcgttgagtaacgagttcctttttcttgctgttgtatctttgacgatgccacgactcctgaatagggctgacttggtgagagggttcggcttcttctgttccttttaacaatcatactatttttaccattttagacccgaaattcattcaaggtctatagaagggcatcttcatattattacgtgtcgaattgttttacaccacagcttaccacccctaagccgatggccaatcagagagaacgaaccaaaccatcgaaataacaattcgacattggtacgcacaacaaactctccaagccgacccagacgacgagaaaccgaccagcaattaggccaaagccctaccattcttacaagccacgcttaactcttccgccaatacctacctatccctcaaaatcttctctttcctcttcatacaacttcctttatttaaacaaaacacactgcaacatgcctactaaacgcaaaaactcactggccgacgacgataccaggccagtcagcaaaaggacgaagccgggcttaagggctcacgctaaacagctaatggacctcatgactgaaactgatatggcttacacaaccgcggacgaagacaagtatacccaggtgatagaatggtcgcagagagaagccgataaaagactcgacgccgacgccgactatactgaacgcgcaatatagagcccaggcgaagaacccccgactaactttggcaaagtcctgaccgcggctgagatggcagaagcaccactttgtatccaaaacgagatcgacaaaaacggcgaatgggttccgccaccacgcggtgtgaagctgagtgacgaaggtgtctatctggccgtcaaaaacatgtctgctgtagagcgcggagaaagattcccagtcgacttcgacaaaaatggacacgtccgagctacatgtatcccagaagaccctgcaccactcggttgggcacacgacctacctatgataatggtggcacaaggaataatcccactcgttggacaactgcatgccagaaagctgggcaacctcaccttgaaaaccgacgccaatatcaaaaactccccggctttcacggtcggcccagtggtcgcatcgaaatccgttgttgaaatgagcagatcgatccagcgccaatatgtgacccacaagcccgaccgggggtacaaaatggagtacaacttggataccgcagttgacgtggtctccaatgaccaccaggacatggcaatcctcctaggtgactgtcacactggcgcccaaagccgtctaccttccagccgacctttcaagttataaaactctatcaccgcacagagaacgttacatttgttctgagggtcgcgtaggtagaagagtttaatgtcgcagtagcagaccgagtccagaagctctgttacgggtatgtgcttcggaagatcactctgaaaagtgggattttgtttacacttgctcagagaggagtcgttaggtagggaggtattctgtggaagtaagataccgggtcgggtcctagtaatagctgacctgagttggatggtagtaaattggacatttatactcctgtgataaaaaaaccgcgaatatacccaatgataccgatagatcacacaaaagacatctatatctagagtattcttatctttcgttcgtctagaaattttgcgcttagccgggaatttgctattaagaaactatgctctacttagctcaatcccctttagaatagaaagagcaactgtacgcgttgtatctgcttataaatatcgttactaacactacggcgggcgaatagcttaaagtattgataaaggcggcgccagtattcgtcgtatgattgaagtgctttctttcgcgatgtcttaaacatccagtcaaaaaagttcacataaatcgcttggtcttccagcagaagatagtccacgtagttatggttcgattgaatgtaatatctattccggtattagtgcccagccctaaggctttcatttcatcaagattaaacccacttccgccagtaccgttcgaccacggcgattcctatcagtgttcttggcttgaagtttggaggaagccatccgagactgcggaaatgctgcaatctggcttacgtttcctcgcaaaggattggatcggtccagaactggtgatcaacttgagctggaggggcggatacagtcgccatagggagaattaagagacaaaggtcaaggtttcgattctatgataggagtcttgagaattaggtgtatagaggtcgatcgaggcagcggaggtgggatgggaaggttgttgaaagagccaccggggggagggcaaacgaagtatcttatagcagctcgaccaggctgggcaaaaatgaaggcggcctggatttgtatgcagaggggagccattttcggcgtctttttggtcgccagtagaaacagtggggggcttacagctgatcgaatgttagaatgggaccgctaatttagcgtgaaggaaaatatattaatccgtgttaatccgcgtttcgaccatctatctgctcagaggggtcttagcgaatgtcgagatctctctttatactaggatgtcttcatagcttataatagacgttcataaagaccccatgatcattatttacagtattatctttaccactaaatcctatcttcttctgtactagggtattataacccctaaaagaatcccgacattcgctgatgtctgacattcgccgagctctcggaattcggattaatacatgttcctctgggccaagaggcgctaaaaattagcggtcccattctaacattcgaccagctgtcggtcgcaagggactaccactaaatcctatcttcttctgtactagggtattataacccctaaaagaatcccgacattcgctgatatctgacattcgccgagctctcggaattcggattaatacatgttcctctgggccaagaggcgctaaaaattagcggtcccattctaacattcgaccagctgtcggtcgcagcgggcggtcaggcggcgactcgccgtctaagttaccggtggaaaggcggccgtttctggcaccagaggcggtcattttcggcgtcgttttcacaggtctttatattctagatgtaaatgaacaaggcagtgcacccatgcccagatattaactgcacatctaattatctttgcgtcattggcaggccaaacaatcatccggaccacaaatgtatagatcttttatgctatgcaacataaaaacgggcggtgaagcccagttccgaatgaaaattaggggtttgggagtatatatcagagtgacatgggataaattgggtatggttttatgaaaatcacataaaaccgaattccaatccgattattgccagcgatagagagtctgtggccagaatgatgttcccagatcgacgcttctgctaacaagaaaaacataaccaatttgcttgtgcttttattcttatctccaagtccattatttctccatgcttaggtacttcgcctcggcgcccttgatgcacgcaatgttggcaccgagcttgttgatcgtctcaatgtactcatcataggggtccgagtcgaagacaataccaccaccagcctggaggtacgccacgccgttcttgaccatcatagtgcgcagcgcaatacatgtgtccatcgcaccgggcatctcggcggagccatcttcgttcgcgctgttatatccaaagtatccaacggcaccagcgtagacgccgcgcttttcaccctccagctcggcgatgagctgcatggcgcgcaccttgggtgcgccggagactgtaccagcagggaagatagaccggaatgcatcgaatcgggtcataccgggtcgcaatacccccgaaacttgagagaccaggtgctggacgtgtgagaacttctccacgaccatcagtcggtcgacctgtgttgttgtggggtcgcagacccggttcacgtcgttgcgggctagatcgaccagcatgacgtgctcggcacggtccttgagactgctgcggagctcctcggagagggcggcatcctcctccggggtcttgccgcgcttcactgtacctgcgatggggtggctgatgatacgcccccgctcttcctttaccaggagctcggggctggctccgacaagctggaagtcttgacagtcaatgtagaacaaataaggggaagggttgacagtgcgaaggtggcggaagaggttgaatgggtggagagaggtgggccgtgatagccgctgtgacgggacggtctggaagatatcgcccttggcgatgtgctgcttcaatcggttgacgtgaccttcatatccctcctgtccgatgttggatgtatactcctgattcggaatgatcgggccctggggcggaagtggtgtgcggtcctggagtagcttctcaattgtcttctggatgatggactggcccttgagatatgcggcctcgatatcggcatccgccgagggaatgggaacgtaggtgataactttgacgacttggaagaaatgatcgaatgcaatgatggtgtcgtaaagcataaagaacgattccggcactccgaggacatccttgagcggccgcgccgtcttgggctcaaagtatctaacacagtcgtatccaacatatccgatcgctccggcggtcaacggcggaaggaccaacccaggtactgtcgcgacgcggaactgagaaagctcatcctcgaggtatgggaggggatctgctgctgggccatggccctcgccggtcttgatgacctttctggggtctgtatgggaggaagtggtaagcgacggaatcggaccaaagactcccgatatcacccacctgcgccaacaaaactatatcgtccaatggtctctgtggtagcagcactttcaaacaagaatgacaaccgcgagctatcgctgcgagtcagcgattttgtccagcatcccatgtccccgccttatcgcgaatgttggaaagaaccccatgactcacttctctgcaatcttcaagtatgccaatgtcggggttagaaggtcggcagcaatcgaagccgtgacaggaagtaggttgggagggtactcggagttcctcgactttgagataacttctcgcgccgtctcgagggacggaatggtggcgatctgactcattggtcaatgagcggaaacaaaatctcgggggtgtcgaacagtggagaaatccagtggcaagacggacgtgtacttacagcagttgccatgttgttataagtggctgatatcgacgatgctagtcaagagaaaggattgaatgggcggtgggaaaatgattcactgtgggtgggtacatgtatgtattgacggccgccgcgtgcaggaatgcgccccggcctgcatgtatcggattcgacctcggaggtttaacaagataagcaatggtgatataaattttaggcttcttatgtatgagttgaaaatcaaatctcgcgcgaccttgaaaggcttacacgtctcacaagtgtgccggcgtttggttatatgcagccaaaagcggactagcgtcgaggggtacatatcgattatcgataaaggcctagcgacatcgggactgtaggatgtacctatattgtaaatacaaacacttcattggagaatcggggtatttccttgattatcagacactaacagtgagttttagaaatcacagagcccacccgagatgggccatgggaaaaaaggcaaaagaaagagtccaccatcgccggtccatgtcattcgccgtgtccacccaaaccggtcccaagcaatgcatgccattatgcattttctaaagaaaaatgtatgttcacagaaggcaaaaagtaaaaaaagaaaatcgggaaaactatgaagggtgatatgtcttcgagggaaagagaaggcttttcgagcgggaatgtcggattagttcaagcagggcatgagtcgtgagttttacgtggctgtttcaaacccactctgtcatcgctgtaaattgatgattgccatcttcgagagtccgtcagcatggggagaattgatacaggtaaactagaccagggagcttacctgtttgtcgaagccataggcaagtcgttttccatctgcatcccaggaaagggcccgatgggggtctgattttgaatagccattctgttcatggtgtccattgtgtccattggtcatgcggtcggcttcctctttcttcacctcggggctagttgcggtccaggtagacataagattaccgccagtctgtttagtgttccagataaagagcccgtccttgctagcagcaccgagggcatatccatcgggggagaaagatccggtaacagcggggtttgagtccaggctcagctgatggatactcgtgtagtcctttgtatcgaggttgacatgccagaccttgaccttaccatccgccgagaaagaagcaaattcaatacgacgggagtcatattgagagctgatgtcaatgccggtgattctatccttgtgggcattggggataagaatgtcgtgggtaggtatccaaattgaagcactcagtccagaagccacgatagcaaccgaatgagactcggtttggacacaacgaataaattcccaagtcgcgttatctttgggagagggaaatgtcttgaccaagcggatgctgttgtccacttcgcattgatagactgcaccctcacctgaagcgaatgccagattgcgtccacaccatgcgagatcataaatatggttctcaattatttgaggttgcgggaaaacatctggtcggcggctgtcgtcccaaagcgcgagttccgatacgttatgatttgaggctacaacgatcagttgtgagctacccgctgcccagtgcaagcccgtgatcagccggggtacttcgggtagtaaatccacggcgtctccattgacgttgtacatggtgatagtgcccctgtcatcagtgcaagtcgcgacggccaatttatcaccaatggcatcccatgctacggtcgagacacttgtgtcacccctcttgagctcgaggattttcttctgcaccggttccgacgacattgacaacttccacaagctgcaaaagaggtcaccagctcccactaccacagtgggatcccgagggcgccaaacgacgtgggtcacgtgatggtccaaattcagcaaggcggtgtccggggtcaaatcgatgggcttggcgggggcgatctggatggaagagctctcgccgttttgcagagtgggcggtagttcgggaatctcctcggccatgctgacatcaccatcctcatccatatgatcgggggtatttggctgactttcagttcgcgccttgtcctccatggattcatcgctatcagtttcgtcctttcgggtgtcctttccggactcggcatggccgttcaccgggcggtcgcgcgcaagttgacccggcgaaactgggtctgtgccgaccgcctcatcgcgactttccgccgatccagttttagttccaatttcaaagggctctggtccgaaaaaaaaatcagacggtgaaaggcttttgtgattgccctcctgtgcatcgccattagtttgggtttcaattgaggaaaccagaaaaaagtaaattattttttccgtttggcgcgtaaggaccgttcaaattgaaacacataccttgtccaaggaggattccatttcgtgatattgcaggcccttctggaccagcgataccagcgcatgggttttaatgtaaggcgcaaacgggagagtctgcggatccgggaaccacgcgcgctgcaaagacacggcggcatcgccatggcctacgtcgagttagaggtcaattggacgggcaaagggggcaatgtgaccaaccggcttcttggaggtacctcgaaggatattagcgctgcaggagatgcatgggttatattgcacttacctccatattaaatagttgacgtgatgcgacgtgaggtcaggttgtgccatgattacatgtgcgactagctaagggccgcggacatgccagagagggaagagctgttttgccgatgaaaatcaaagtggaggcttcgatgcgcgagcttcaggaacacggaacacgaggccggaagggggtgggaacttccggataaacagaaaatgggctttgcttgtattttccgcaaagaatttgagacgtctgagtcttgaagatcgaaaagaaagccaagacaagggagaaattggagtttcggggagggggggtggggaatgaaactgaaagagtggagggaagaagaagtggaattgaggatcaaaaagaatagaggctattctgtaatctcctagaaatagaaaccgagtattcaaatcgagacgaaagagtgagagggagaggaaagtgaagatctgagattaaaggatccagaatgtttggcagaagtccatttaacacacactagccactttggatcctccctgtggcgtcgactctccacactttttttcgaacttctccttctctccagtcgtttttctattaaggtatatgacattgggtatctgcatgatatttaaacttgatcaaacacctctgctattccaacccttgaacttctacgacttcaaattactctcccgctaagcccctaaaaatggggttctccacatatcgggggatttcagcacgagcaccctttgcaggtacataggtacttgattgattccctcacttcttggcgttccctttccgatttagtgctcaaccctgccgctttttgctcggcgtcaagtcgtgccttcgacaattggacgaaaacattacccaaactggacactccacaccatggatccacgaagtctcatccatccgtcgtataaggaatctgtatcccccttcacactcatgcattggtcctatcctgctctcttatatatgatgcgctcggtcggaggaaagccgtcttcattaggggcatattcacattcatcggcaaattcatcctacacctcgttcaagctaccccaattgcttgtcggtcgtatcatcatcagtatgggcattggaacggtctttaccatggttccgtatggcactataaaagccaccaaccggggcaagaacgtcgtgatcgatggtatcttcattaccagtggcaattccatgctactggaacaattttggctcttctcatatcgaaggccagtccgtgtcatggatagttttcctagaaatccctgctgctctgtcccttgtcttgatcatttttatatttttcttccctggattacctcgccggctcgttttaattggccagggaaaacaatccgtaaaggaactaacttgaattagattgaaatcgatgtatcgaaaatccgacgcgagatctcatctgtcgatttttctccggaaaccgctcaagttgccgcttccttcgaagatatcttcaccatgcaggatggaagctattctaccgttctgtgctgtgtctcgacttgcaggtttaaactcaagtgaccggagtactttacagccgtctccaagcagaacctgggattttcgggacaattgccccgtatttcggagttcatcgcttcgttcgttgtattcttcgctattgaccatttttatcgacggaggctgttcctattttgtggaaatggcctcacgctttgcatgatatctatgaccatcattcccaacttctctagtaaaaaccacgcggcgtaggtggtcgacgcgtttttcccgttcatctttcatcgaggtacaaggttaatcaatccatagaacccgttgccttatggcataaccttaaacaatatttttggccatttcaacaatatacttaagacatgcattccttaggcaccaacccctccttcaatccccaaaccaccccgcgattcagagaagacatgccatgcgggccgaagtcaaacgtgcattccttcttacaatattcttattacaccttgaggcacgtattcgtcctgccaaacaaacacctcaatcaagatctagggcgagcaccccgtccttttgctgctcagacacaccttacgatgtccagagttcttgggcgagtatcccgagaccctcaaattgttagtgcacgcaggacagtacgtgcactggtcctcaatcaatcgtgcaacggaatgggcagtgtaatagctcagatcggtataagaaccgtgataaggaccaaccctgagattgcacgaactgtaagtgtaaattctccttatgttgccaatgttcgaccgcgactgggacatattctggagaagggaaaggcagctagacttgtacgcaaggttacccgtactgcatttaatgccgtatgtaacacgcttgttgaggctctcctgggcttcttcgggagtttgctgggcgatagtcgtgaagaggtcaatgatgtcggtgtgcgaatctgtcttgcttgtgttgccgtagaataagagggcattggcatatagctctggctcggagcttctgtagcccaatgcgtcttcctcgatactctgaagaacggtcaagtttgtgccctcgatgatgccggtgctgctgtccacatccccggaaatgtggtatctggcccacactgcgtcgccgaatcgtccctcctgtgtggcgttcacgtattcgcttgcccaaggctcgacgatagggaaccctcttgtgtcattttgaaccacctcgtcgatggtgaagtctagaaacagctgttcgacaagctcggtggtgctcagactcagagcaatagcggcccgttggtttagaagcagagttgcgaggaggtaaagcgaacgcatagtgacagggttgaaaaggtatgtgtatattcttttaagatgggatgatcaaacaaagaagaatgaggtttgaagtggggtggaaagaagtaaaccaaattcgggcagttatttgaatgttatttatacatttcctgcctcctcatctaattctgtatagcagcatatttaggtcaaaggtccctagacggctgattgttaggagcagatcagctgaggatggcagtagtgtatacatgtattcaggttacattgcatggcttatgcagtagaccccaatccttcgaacgcaatgctcaccttagaggcagtggcatcagatgtcaattggttgactgatgtacttttttttctgtttctgtctcattccttcaaaatacgaggaggatgccgcaggattccccaaaaatagggaaaactatcatattacataaaaagaaaatataacctgtgagatatcggatggagtaagtgggagagacactaccactataagcttaggctattggacagaagcctcacccccgcatggtagtgttggtcgagttgctaatgtagccatgtaaccatctgggcatattcaaagctaaaaagcgccgaggccatgtttttcgccaaatggtgggcatcatgcccccacaacaaagccgtgccgccctcttgcttactgtaagaaagccttataatgtcgatcatccaaacatatattttaaagaagacaaatgatcatgatcgaccggttaaactgggtcttggcattgcttagcggctttgagccacacaataacagaaccatttggccccagcacgtcgctccaggcttgacgttatgatatcatggggatccaaggcagaagcatttttgcgtccactctgagattgtaataaacgtatcgtgtcttacaaatgtaagaagacaggccttccgtttctcccaacgcgtctggtgactctgatcatcataatccaccccttgaaggtttaactctgtctggtatgccgctattccgcttcatgcatgcgcttcgccccgattgtgggccatgacaagcaacgggaaacgatgattccggactaaggatgacacggcagctttgcatttggagtcgatgacagtgtatgtagatcaagcacctgtgtacagccctttagaagaataattgatggtagaatatgacgagaagaacctggctcgatggtttctttctagaatccaagcagctcaatgagacgttcgttacatgacaattaaaattccaattcatcagctagaagctcagcacgatgttcagcccgggcttgagcccgtagctccttaatatcttgattgccaatgcgggtaaggaggtcaatcacatcacgatgtccatccgaggcactagtacgctcgtagacggacgagagcgcttctgcatagaggtctggatcgcccaccctgtaacccagtgcatcttcctcgatcatctgcagaacggtcttgtttgtgtcctcaattatgccatcatgcacaccaccatcgatatggtagcgtgcccacacagcgtcgccgaatctgcgttcccgtatagcgttcacgtattcgctagcccagggttctacgatcggaaatcccctggtatccttttgaagtacttcttgcacagtgaagtccaggaacagctgttccaccagctcagtctcgctgatactcatggctctctatcgaaaatatgttatttagatagtgttggtatgcaataaacttcggtgcaaatacctgggtattggcgtttctcttcaagccaagactcaaggtcaagtagagctgcagtagatcgatgaaatggaagatggaaatgatcggaaagtgagactgtcgcttccaaggttagtttattgtctgagtcagggcatactaggcagcagctcaggcaacaaacctcggaaggatcatcgaattaatgttacgggcccacagcggggcagggggtcttatgtaatactaaaggtactggcgctaagcctgaatgggattagtcggagataaaatcctacttaatattacataatcacggcaggaagcgaaccttaatggttatagaagtgggtctttcgacatacaacatacctaaattgcctcttacatattatgaatagtattactcggaagtgtgggcgtcatggcctattaggcactatagtgtgagaattgcggctagcagagtacatacctaaagtaatctagcggggattgtgttggtagcccttctcttactgtcagaagaaacaaacatgatggtcttataccaaagtgaatgacagttatgaaataagtcagccggaaataagagaagccattcctattcttatcatcacatggttatatcatcacgttactattcaattaaccgagcccatgtcgtggtttgtcttatttgtgaatagtggcataaaccgaccgccctcaggatacctataagaaggtggccctgcccccagaacttcctcttcttttctttcttcttcagctctctttgcctctggcttagatcaagtgtagtatctgttctattcagtttaatcgctgaatgttctgcattgcagaacgtcatgattattctaatatttggacctcgcgacttggcctctgtgcttgcacacacctcgttgcacagtgtcactgggcttacactacccccgatcgacgcgaactccttttcatcaactgttcggcttgtccgggcgattggagaagatctctgtttaggatctacgttcttggcaagagtgccgattaactcaccgcccttttgaagagtggatctgaaatactgccggtaaatattaaccaatgaaagggttataccccgatggcatacatactatgtactccgtaattcagatcggcagcgcatggtgtcagaatcttagccaggattgtaagcagagatcgtggatggatacttcagttgccgggcagggatacaaggagtttcctaaggtttgatactagcgggttctttgtcaaacagacagggaggaattgactgcaatgtcactttagtatctcaattcatatacaacaataaatgaactattggagtagtgaatcatcagccttttctacacatctaactttaagaaaatagtatagaagccaaagcagagttcattaagaatcagatatttaaaactcaaggcttggagtacaaggtggcaacttgcaagtacatcctttctgagcaactctacgggcgactaagtatggtattgtgtatgtctttttttgatgtcttttttggactcttttatactaccttccgaaagatctttatactgctttttgaaggccttaatcagctatataagtagctctttgtttgtttatagaatgcgacttcttctctcttttattctctctctgtttctcagccacgcatcacttttgatactactattatatggcttttatactcagtccctcgtttaactcccaatacaactatatattgcatacattttcgttgatactgaggcagaacttgccctcccagatgaagggattatcgacctagttcatgagtatatctcggatatcgaactagatcccgacatgagtgcaaactcctcgtcctatggtgaaaccatccttcggcgcaaatcatccccggatatgagccttgttcaactattaaaaccacaaactatgccactctcgaaaaatcggagggcttccattactcgccatattactaggccacgagatcgcccatatcttggaattccgctgtattcgtgcctgcaaattccacactgaagatgaaccttccgatacaccaccgggcattagctgcggtgaggctggcacggcctgggatctgaggtcctttggtggtcgtatttatccagtctgctagcctgacggtagtctatacaatattcggagcttatgtcccaagagcacctcttggaattttgacgcgatgaagatgaatgaaaattggcggaggcgcattggaagcagaagcagtcgttgaaagctccaattgacgcatttgctcgatttgcacttttggaggatgacctttttggaggaccaggtcattctttttgaattgatctatatctacttcggatatggaactcgagagggatggtttcagagaagattaaaaggaatcataccttgcggaggccagaaatcacttggtgcttcagttagaggcttggggaatatgcgtaatgtttcctagcaacatctatggatgctgtaattcaagccgtattgctagttgtaagcaccatgaaggtacatgggtccctcacttccagtatcttttgaccctgcagctaaatcttctaatcgtccacctcaaggcttccgaacttatgcttagacgattttcagattatccattcatctcccagagaattcgcagttaggttttttggtggtaccgtggggctcgtcgacgagtactggaatgaacggggctcgcaggcagcttaggattgggaatacattgaagatttgaagtccagttacattttcaatcgagaatagctcatacaatgaatgctagctgtgatattgctgcttccttggcgacgatgttaagactgtaacatccggcacatgatttacatcctgacaataattgcatgcgttctgtttgaaacaaccaaatctggccttcaacatgtcagccccaaaagtaaactcgtcaaggttttccataacccttgctagaagtagtccgaggcagcacccgacaagtaaaaactacagacactagtattgtaccaccctggtgaccagggatgggctgtcttcctgcttcgtctcaacagtggcagcagcggtaacagcggtaggatcttgtgccttaccgcgagagcaagcgctgcaagaaccagggcagagccaccggtggatcctccttagtacaaatgggcttgtcaatgggacacgagaatgttttattgtaaccggacagcttggggagtagtgcgacggctcatcaaacttgtcgagaaattcagagtcgatgttggctgtgtaaacgtaaagggtatcggccactattccagaatgggctaggacctgtaccttcttaggtttaataaatagtgcacctatccaagattgtgcagaacataccttgaaagaattcgctgtgttccgagccatttgctctgtacttagtgagcacgagtcagccgttctcgaatttgcactcgaggtgatatctgcatccacatgactcgtctgattctcgggtttgatttcggaatctgctccttgtgactcctgctgctgcgcacgccgttgcccctgggctagagcgatcagtatcgccacgatgtatgggtcttcgacgggattttggggttcaagaagtttcagctttttctcccagacacggaaaccgggttcgttgcttctatttcttttgcgaggtggcgtgtaggacacgtgcttctcgcgaagtaactgtattttaccgaacgtgatataggcaaggtttggagctacggagttgttcgtgaagacaccttccgttctgattcttgcaacagcccgacgattaaagtaaaactgcaggttatcagaactagaagcttgttagcagcaccatcaatgccgtgaaatacgggatatgttactctgaatattcaatatcataagtaccaagtatggttttaacagctgccttcttgacatccaaggcgaatctccctgccagatgatttgcactgatcatagcccgacgggatcgccctttcactggctttatctgcacagcatcatctgctgccctatctccatggaaaccaggatcttgcgatgcgggttgtgtttgtgggttttgcggcctcctctccttctggggccggaactggcacgtcaaaagtcgtagttggtttgaggtccatgctatcggccgtacatacaagcgtgtcccacagttatcacgaagaattgcctgaatcgaatctggttggggtaggcccctgactgtcgttggtgggtacatggtaagagactcgctttgggagggatgaggtcgctgcgctggaggactttcaatatcgtttccagcctttcgcttggatccaattattgaagaaggtaagtctgacatttcatcgagataattccctaggaatatgcgaatttggtgcagtggtagtggctgctgttgaatcaatgattttttgacgcgcgacgcgtaactaggtaactgtcaccctgcggaccgtcagccacaagccacagctccaggctccagccctaggctctagccccatccttgtatagtactacaggggtccaacaaacatccattatttacccctcagtaaccccctcacttttacttagcagtggcgtgaaggctcgaatgaccatcaaatttgagaaactaaatgtatattccacatctcgaacgttctttgagaaatgagctgacgcgatatctatcagcatgactaccccgatttataaagctcgaagccgagccgaatttggacgtctgtctaaggagcatgagggcttacggcttatttcgcagctcaagccaaaggaagtgatgcgttctgctagcagatggtcattccgacatttgcttggctttcgactgctcactctcccagaaaagccctttctggagggttttaaaactgatcacaagaatcactgcccagtgtgtaatactgaaagacagagttcccagaacgttgaccattattggacgaaacttctcacctcagattgtccaatcgactttcggaaaagcacggactctgagcttctacgcctaccaggtggttttttttgggtccaactcgcacgagtaacccgctcgcaagtcttcatagagccgcgggtatatcctcagcgcgaacgacgacctctaaaagcagacggttttgttaattctacatccgccattccagggtcctccccttccatgaagctcagttcatccgaatttgaggttgaccttgacgacctcgacgaggatgagcatgacgctcggcgaagtaaacccgaggaagtcaccgttcacttcttgatgtcgtttctgcaattcgctttgaacctctgtctattacaggatgaaggagaccacgaggtacgaccgcgggtcgaacgccttaaagctacgatccacattgctggccatgatattagcgctgaagatgatggtgggatttgcagcatgtaccgggacaccgatggctggaggatgataaagccatacctggccctcattgaggcgaaaagggcgtttaaatatctcgactttgacgagcggacgggaaaacctaagccagtagtgtcaaatgagaccctggctcagtaccttgccgaagcggtgatatcatggcgagcaaaccgaggggaactgggccaagagtaagtctatcattggtttgtggcattggtttgctcttcttttgcaattgttgacatatgcttctatctacagtgtcttcctcctcgcagcgacgaatacttttctacgtgtcattcatttcaaattcggctctcattatggcgaatacatcgatgctacaagaaaggggacacagaagatcctggtcgatgacgaaaacaaagacacgtttgtctacatgaacagcactgaatggtttaatctccagacgtctgggggaagaaagtctgcgctgtgccatattctagcgataataaggtggcatgacggagactaccccatacgtttgcctgtcactcatgactccagtgtccccgaggttgacagtgattttgagactgactacaatggccccgaggttgactatagtgacgaggttatcagcggagatgacggtgatctccccatggaagaccatagcgattaggatatggatatggatagtttctgggagattaagtaaggcagaaggttgcctacgggattgctgtgcactaagggaggcattatgctatgggctcgtgttgcggaattcgaagtcggcctttaggccacgaaagaccctagcgaggtcgaagtaaatgaaatctacttacattctccttagttagttacatgtttttgttttttttttttgactattaattgtgtcccaccaaattgtgattttcgggcattgcgatttcctacctatatacagtctacctcatatggcttctgggcctcttgtatgtctttttaaatgtcttgaccatctcctgagcagccactctaaccatggaagctacatagactatttattggcctttctcccttctcgttctctctctcttacacacaccatcacaatggacatcatcatcgctctgcacacataggacacattctcatagcaagtgggcttattaccatgccgaacgaactggcagtacgagaaatagatcgccaataacacaaccaccatatggacgaagctttaccattcatgcaagctagctcaaactctttcatcaacgccaccacagactaattcacccgctggaccagcgtcgtcaacatcaaattcaccacaaagattttacttttgatatttgagtctttccttctcttttcttcatgttgagtatggaagatgtgaagggagaggagggggagaggagctccagccagtggaacaggatcagcatgctgcaaagtggtcggcagattgatctgcttctgttcttgaactgactacatatactctatccttaccttatcattacattctccttcttatataattagatagcactgactacgagctcaccctctgcaagagtaagtctaccattgggtttgtggcattatattgctcctcttttgcaattgttgacacgtgtctctatctacagtgtcttcctcctcgcagcgacgaatacttttctacgtgtcattcatttcaaattcggctctcattatggcgaatacgtcaatactgaaagcgagggaacacagaagatcctggtcgataacgaaaacaaagacacgtttatctacatacacagcactaaatggtttgatctctatgaatacaccacattgaccctgatggagtttgccgataaacacaaggatatcctcaaggatgtttccaagatcctggggtggctggcaaacgtgagcagcgtgggcaaatccgatatggagcaactgaaggccaaatttgacgacctgaaactctaagcggaacagaatcttccctcgaaggctctgggtgattggaacctggaggaggtcgagagtatctttgagatccagctgctttcatcggagaatgaggagccgggagatgagtgagacttacgacccattctccgagaggagttccaaatcccagccgcctttgacgaattctacgatttcctcagtaagtacccgtactgtggagaataaggactgagaacttcgagcgctaattaactcggagtccccgataagttgcattcaaacagaaaccgcaccctggttcctgtttcacatctactgcgcttttgtagcatgaagctgatatagaagcagaacgaatttggaaagctaagccagctatctaattgtcatagatcacacaccccttctatgaaagctatgtatgttctgttcatacatactactttacactcgtaaacttcaacacagcactgtagtctgcatatttcttccgggaattagggttaatgatgttaaatccattgcagcattctgagctttcttaagattcaagaacgcttagcacctctctctctatctcaccactctttcaggcttctatggccgtccggctcatgccggtacccagctattagcccttgaggcttgtcactccttcaatttaatctagaactgaaaaccaaacagcagagagcaataaaaagataaatagtatgtggtaaataataagaaagatgaggtgatggcatggaatataagctgacattaatcacaggtgacgtggatgtatgtagaagtagaagcgtctcgccaaacaaacatcgggggacttccgccatccgctctccactaaagtctcccacctcaactttccccatctctacggcctgtggcgtcttgcagctccaagcgagcttcaatatgtcgctccgaatcaaccttccccctgctactcgaatctgtctcgtcagccttctcactctttccctactctataacattgccagatggcggcaaattgacaccaccggcggaacaccgaccacatcgcctctcgtcccctacctgacgctcgtcccttcattcttcttctactacccctggacaatcgtcacggccaccttcgtcgagcagaatatatttaccgtcctgttaaatgctgccaccatattctatggcggcaagtacctcgaacgcgcgtggggctcgcgcgagttcagcaagttcatcgcagtcgtcgccgtgatcccctgcattgccatcatcccagtctacctgatctggggcgcagtgggaggctcctcaagcagagcgtatgcaccccccaaacgagcacatcgatcaccaccctataccaaacaaacactaaccatctaaaaaaaaaaacagtctcacccaaatatgcggcggcgtctcaattcaggcctccttcctagtcgccttcaaacagctcgtcccagaacacaccgtgacaatcttcaaaggaatcatcaaaatgcgcgtcaagcatttccccgccctcttcctcctcctaaacagcattagcggcctcgccatcggaacagacaccgccgcagtcctctcctggctcggcatcctcaccagctggacctatctccgcttctacaagcgacagcccgacctaaccggcacatcgaacggcacaggcatcaaaggcgatgccagcgagacattcgcattcgcctgtctattcccagacgtgatgcagccacctgtcgccttcgtcgcagaccagatctacaccctgctagtcaccgctaagcttctgacgccgttctcggcggacgatatcgcctccggtaacgagctggtgctggcgagaggcgaggcgggcttgcccacgctgttgaataatcagcgtggggccaggggcgccggtaagcgcgaggaagcggagcgcagacgggctattgcgctcaaggctttggatcgcaggttgcaggctgccactattgggcgcgtgcagtcgcctggtttgggggagcctagctcgtcgatgccgcgtcctaccacaccgaatccgactgcgccggctgggcagagtatgctgggggaaacgagttacaatcctgatcatgcttgagtgatcgagtgcttccttttttttttctcctttttttctataactctggcgttttgtgatgcactttgggatttggcctattggacatattcgcattcgtggcatagctggtttgtggcttggtttctttctcatactgatagttatactgatagtgtgtgcacttctgatgatgtacatgatttgttcgatttgggggtttgatttctcgctctattcattaggctgatatcttagcgcctggctttttggccttgaattcgatttgttttataccagagagcttgtatgttcttattcgaagaaacaattttactccatgaatctgtacctggaaccattttcaatcaggtatacgctgtattttaattatcctaacccggctattcgctttctgctcctatctccatctcagcttcctcttcgtctagcaacggcacaaaccggaagtccacaaagcacacaggtccattgggaccctttacgccagcaccgatcgatctgcccactggcacattatgatcatcaagctcaaccatgaactgtaagctcaacaccccctgtctatccccacggatgctgaccttattagcgacagacatagctctcgcggccttgcgaattaacgaaaagcgatagctctgttgaatgcgctcgcccatagaggaaggaggagaaacaaggaaagtctctgtgaccgtaggtgcaagcttagctttagttgcgcgagtccgggcagcgccattatcgagcaacaccttacgcatctgagattgtgtggtgccctgaccagcgccaccggcaatctcgttatgctggtcaactgagaattccacagtggattcactgaacgggccgcctgcaccggagagagcaaagtacggttctcgcttggcacaggcggacagttttaggatcgtgggggtggaggagtcgagttcggcaatggcattgtgtagccaggcggagcgcataatgattttcatgatgatagcgtcgcgctggaggggaatgtctgcttcgtcttcgtcgggctcatatgttactagctcgcaggttgttttcacgccagcttcagtgatggtgatgctaagtggggcgccgtgttgggcgtattttagggtgcaggagcggtccatgagcaaggctggggcgttgaatgcgcttgacgaggcggtgccggtttgcgtgatgctagtgtcgcggggtcgattggactcggagagctcgttgataccgaagatctttagggtttcgaggatagcggtgagagaaacaacaaaatgagggtaagcctcattttgcaattcattgtcttcttggggtgttccgttctggttgttaggttcagggtcggtcgatggattgaatgtgtagctggtgaagagtgacttgtcaagaaacgctagtccttgaatgacgcggccttcctccactgagaatcggaggccatccggggtgatttgaacagtggccttgtgtgcgaaaccaatgcaggagagcagcgtgtagagatggtgggcgttgttggagacaccagcgaaaaggggctccattttgtggcgtaggctggtagctcgaacttttcaggcgcaatactggcacagaacaaaggtaattgatccgaagatgcgtgatgactttggatatttagcagtacagaccctcttgaacccaacgcttatggtacatttgaggggacgcgcaataggaaatgtagccggttagacgtagactccggcggcgcaaatcatgaacacagctccaaaactatccgtaatacccaatcagtatatcgtatgcctaaaaatgggacgcagcgcattactaacccagatgccaatgcggccgggatgcccaaggatacgatgccgaggaaagaccgatctgtttggtgtaatgtcagagtcaaattcgttatgatttggaaagtaacttactcaagccaaatagagtggccgtaaccaatgctatcaatattagtcagagattggctatttccaaagctgtgagaaaccagaagcttaccgaggagcagcaagttgaagccgacagagaattggctatccttggcaataagagggatgaatggagttgcagaggctgcctcccagacttcgttcagagacattaggataatagaattgataaatgtaattgagggacgaattgatgcaggtcaaagatatgcgaaagtgatatagatcgactaatgttaatctggcccgaccggcggttagttgttccgaccgataccccatgccattgtcggcgcatggtcacctgggcaggtttgaaggacaaggacattatgattgctgaatcgccaaagagtaagtgaactttcatactttcacattgtattttgtcaaactatttctgacatacgactatggtatcaggttccaagcgcaaagcctctgaggaggcagcttccccggaatctgggcagcagattagcaagaaggcgcgcacagattccccagtgaaagaggtaagaggctccccagggctactatgtaaatcgcttcgcgtacctgttctgacaagtgccccgcacaggaagatggcctccttcaaaagcctccgctccgaattgttccattccctgagaaggtaccctcccatcccacgccaccatatcctatgtctcttcgtggacaatggctgatgatcacagcccgccgttcttgaagaacgccgaggcgacattgagttccgtgtcgtcaacaacgatggttcccacgatagcttcattgtcctcacaggcttgaagtgtattttccagaaacaacttccgaagatgcccaaggactacatcgcacgccttgtctacgatcggtcccatctctcgatggctatcgtaaaacatccactggaagttgttgggtatgtcacaagtgcctgctgtcctttattggttggattaggccactgacaaactacagaggaatcacgtatcgtccgttcaattctcgaaagtttgctgagattgtcttctgcgctatatcttcggaccaacaagtaaagggatacggtgcacacttgatgtcccatctcaaggtagacatgcttatggatctgcaatttctatgcatatatctgacttattgccctataggactacgtgaaagctacatctccaattatgcacttcctcacatacgccgataattatgccattggatacttcaagaaacagggctttaccaaggagatcacactcgataaagcaatctggatgggctacattaaagattacgagggtggcacgctcatgcagtgtactatgctcccgaggattcgatatctagagatgggacgcatgctcaccaaacagaaagagtctgtgcaagccaagattcgcgccttcagtcgctcgcatatcatccatccccctccgaaggaatggaagaacggagtgtacgcgatcgatcctcttagcattcccgcaatcaaagagtccggctggtcgccagacatggatgaaatggctcgccaaccacgccatgggcccaactataaccaattgctccacttgttgaacgatatgcagaatcacagcgcggcttggccgtttactcaacccgtgaaccgcgatgaggttccagactactacgaggtaatcatggagcccatggatctgtcgagcatggaagagaagcatgagaaggacttgtacccgactccacaggacttcatcaaggacgccatgttgatcttcgacaattgccgacgctacaacaatgagactacaccatatgccaagagcgcgaataagcttgagaagttcatgtggcagcagatccggaatattccggagtggtcggttagtatccacagtgaagctgttctcaaagacaattctaactctgatatctagcaccttgccgataatcattgatcctgggacatacattcattgcagcgagggtgtttttctggaacggcgttggggaattgaaatttgataggcaataccctgttgatagattacaacatgcgattctcattcatgaattaatgccagtttatgaatctcttctcaatgttgatcaaatagtctagatcgacgtctagctcaacccatggatggatatgttgatctattttcccaccaatcagatctatagatgctatgcttggtacggtggggctggtatctgtcaagctcgagttgatgtctatagtagagcatagagtagcttggatcatagcagcagagtatagaagaatatacataggtagaaggcaatataaaggcgcttatatgcatgatgatatgtgatgcaataacctaaaacctcaacgttaatttccccctgacagggcttaatctcggattatcgttgttgcggggtctcaacaatgctgatggctggaatagcctcacagacttcacccttacgtcttttgttccgataggacttgtgtttttcaatttttcgttgctttctttttttgctgttgctattgctgggccgacctagttgtgttacaacctcaggggctcgatatccacacaccattcattgtttacgcaccaacgtggagctcaattcgtttcaacccctctcatttcgctctcgattttcaccattcgctttgaatcgcctccgtcttacccccgtatcttttagggtgtgcagagattgctggcccgcttgccgacgcgaccttaatctctcccccttttgctcccccgcctttgctttgaaatttcggtgctggtcctttcatcgttgcctactctaaacacattatcgatatgtctcatcatgatgttgtcgacgcggagtcgcgtaatcggctaccgactctctttgaagttctcagccgccgaactctcgccccggtcgacctcttttcgttctacatttacatgcgcgatcagcagcgttccgtagactatctagacttttggtgagtgtaagctcgcgttggatgaccgtatctgaagttaacgcgacccataggcttgatgtatcacaacacatgctactgtgccgacactatgtccgtgaacttcgccgttccgtcctcgtcgcgacacccgatctggaaagagaaccttctgccatgctagacaatctggagaacctaggtgatattccgctgacagaagctgggccttctcgtctaagacacggattccaagaaaacgaaaagggcagagatgccgaccaacgcctgtctgcttttcttcgctccgaaggccacaccacatcaccctcccgaaacagtccaagatcttccggcgaatcagcgcaccaagcctcttcctatgacggtggccgtgacaccccggattcccggcttgacgactcctcccccgggcacacagtggcccgcaatgacattcgcgccagcgctgagaaaatcttgtacacatatctgcttcccggttccgagcgagagattatgctgccagaatccatggtttccacgattatcaacctggttgaggatgacggccgagatgaccccgaagtgtttgaccctgccaaggactatgtgttccaggccatggagcgtgatgcattcccagggttcttgcaagcaaaggctcttgggaacatggttcctttgagtaccatcttgcgcctcgcttttgctctgattagcttcggcggaggattctggggtgccttctacgttgttctgcggaataagcctcggcatattcgttgctgggtatgttgatgatcatctctaagcactaatgaatctgtctgctaactttatttcaggtcattcttccatttgctgtcgccgcatacttcatcatctcctatcagtacaagatcgaccccatcatggcgttcctgggctacagtgaatacacctttatgaactgggccccaattcgcgagccatatgtccgaaagctgctgaacaagcgcgccgtcgtcactgcgttgatcgcctttttcacagcggcagctttaagcatcttgtttattttcgtccccggtaccatgatgtgagccgtttaccacgtccagtgtccatctaatacaaacttcaaaacaatcaccccgtgaacctcgttcgatcattcgatcattcttacgtctacaattgactcgacttgacctgtccaaggcgttcccgtcgtgtccgagtacagaggttttgcttctatggtgcatattcttgaaaaagactatgtctcggatctgcagcccattttcttcctgggagctatacagaggtgattgtttcctccatccgtcctatcccgcttattagcggtcacgtctacttcctctttgtccatatttactgtctctgctgctttgctgtgattattttctcttctaccaatacccctcaacacttgaaaatgttgtattgtatctatttttcattaatgagcgtcgccattagggccttacgaatgcaatttgctcctttccgggttctatcccaagagatgaaactaaaccataatcaagtcatttcgtatcataaatcctgttggagccgctgccatcttttgtgcgacataaccatgagcaaatgggagcacctccgcacttcaagacttgcgccccagcaccctctttggctgccgactatttcccgcgcgagcaccaggcgcctcatcaatatccatgcgcgagccatgctcaccaccgtcataattgtcaaagtacccatcatcctcatcaatatcgtccgcatccctcttactccctccgaggccagcgccaagccgaccaccgcgccgaccacccctcttcgccatactttgcttcctcttcttagccttctctaatgcctcatcgtgcgcctgggcacgtgcagcacgcttcgcagcatcactcttaacgcgcgcaatctccgcctccagatcggagacaacctcgccgcagcgcgattcccactcgctcaagttggcgatcatcttagggagggactggggtaggacatcgcggagtggggcgacggctgtcacgttcacggatggtgggttggaggctggtgagaggcggcccgctatcaatgaggcgtagatggctcttgttacgagggattcgagctcggattttgtggggctgctgagggcggtcatcagggcgctgtaggtgaggggtttgattgttgttgagagggttaggagtgagagaaggcggagtttgagggtttgttctgtgttcaactcggggaggtttggggttgctggtgcggggtatcggtggttagcttttgttctggtaaatttgagggttcggttctctggggaggtttcatttggatggtttgggacatggtttggtttctgggctttggatgcgtgcaatcttactttgatattcttgccatgtgccccatgcgaagatctctagtagctttagatagcccttaaactcggctggagtgtctggtgaccgtaatgcctggatcgttggcagctcgaggagctctgcgaagacgtaggtttgcgcgtttgaggtggcatttgtgatgagattcgcgataaagcgaggcgaacctgcgctgttggagcgggctaggtggatgaatggttggagagcctctagggctcgtgtgtgggtttgatccattgtgatatggttaaccgaggtgtaggttcaatgagggtatttggggatattggagagtaaccaagaaagaggactgcaatatgggtgggatatacgtggtagctgagttcaagatgggaagcatcaaatgtagtcggagatgcttgtttgcattgagtgcaaacacgtcttatctgattcctctacaactctacggagtatagagccttggagggctgttgctttttgtttttatttttcgtatattcattagttcctacttctattctgttattgcttattctatctcgtatctattatataattgaatgctagcgtggtaatctcagtgcagggcattctgcaagtatagcaaagcgacaatcagacgcagtgtaaccaggttcatctctgtagacatttgaaacaaccacttattttcgtattgcttagtctgtttcagccttccaataacccacgaaatttgatattaattccctcggggatcacttttaatctaattgaaaacccgaccatctatatgtaatcagctgcccacgcggacattccatagcgtggcagagtcggtccacatcaccgaggtcctattcccgagcaaatccactttcttttcctctctccccttgcgcctctggctgattttcaataaaatccgatcgacgtggccttctaggcagactatttctttttaacttctgcagttctctttgtctgctcaacaagggaatgatctgttagtcttgcgccatccgagaccttccgtccctcagcacgttatcaccctccgccatcgcgtcggaggtaatttggtagacaccctccatatgctatagtcgtcgtttctcgccgtgttcgcctcgcgcttcaccgtcgagcttcaccgtcgagatgttatctacaaatccgcacgccggcggggccggtcgacccgcactggccactacaactctcaagatcgacggaatgacttgcggagcttgcacatcagccgtagagggcgcgtttcaaggggtagacggtgcgcacgatgtgtctgtcagtctcatcatgggcagggccactgtacaacatgatccgtcagtgttaccacctgcgaaggtcgcagagatgattgaggaccgcgggttcgatgcgacagtactttcgaccgaggaacaaaggaaccccgactctacttcttcttctccagctatgagactatcggtgaccaccctagcgattgaggggatgacatgcggggcatgtacgtctgctgtggaaagcgggttgaacgatgtcagcggtgtgaactccgtagacgtatcactactttccgagcgcgcagtcgtggaacatgatgcaggcatcatcaccccggagcagatcgcagagctcattgaagatcgaggttttggagcgcgagtgctggatactgctctagtgggctccaaggagccacctgcaccggctggctcggaagagaaatctggacttctagtcaccacgatcgcaatcggcggtatgacatgcggcgcttgcacatctagcgtacagggtgccttgggcagtgtggatggggtaatccagttcaacatcagtcttctggctgaacgagcggttgtcgtgcacgacccaaccatactccctgccagcaaaattccagagcttgttgaagatgctggatttgatgcgtcaatcgtttcatcagaggcgcaggcatcaatttccaaaaagacacagcagataaatttgagcttgcatgggctgcgggacggcgtttctgccactgccttggaggacaatattttacagcattccggtgttcattcagcatcaataaaaatggctacctctcgtatggccatttccttcgacccatccacaatcggaatccggtctattgtggaaataattgaggctgctggttacaacgccttgattgtcgactcagatgataccaacgcacagctacagtcattgtccaaaacaaaggaaatccaagaatggagaagatccttcatcatcgccgcatcttttgcggttcccgtgttccttatcagcatgattcttccgatgtatttgcccggaattgactttggccgctttgcactcgtcccgggcctatatctcggagatgtagtctgtcttgctcttaccattccggtgcaattcggcattggcagacgattctatgtcaccagcttcaagtccctcaagcatcggtccccaaccatggacgttctcgtaatgctgggcacgtccgctgccttcttttacagctgtttcaccatgatcatgtctctttgcagcgcggaccacggtcgtcctagcaccgtgttcgacaccagtacgatgcttatcaccttcattactttgggacggtggctagagaaccgagccaagggccaaacttccgctgctctttccaggctcatgtgtctgaccccgtctatgactactatctacgaagatcccattgcggcagagaaactggctgagcgctggacctccaaacctgtacatggcgcgcctgagcaacccacgttgggtgatgatatgacggtgaatcaaaagtgcattcccaccgagctgattcaagtcggtgatatcgttatcctccatccaggagataaggtgtctgcggacggcgtgatcatccggggcgaaagctatgttgatgaaagtatgatcagtggagaggcactacctatccacaagaagaaaggcagtcaggtcattgctggaaccgtgaacggcacaaactcaattgatttcaaagtcattcgagccggcaaggatacccaattgagccagattgtaaagttggtacaggatgcgcagacgagccgtgctccgattcagcgcatggctgatatcgttgctggttactttgttcccaccatcatcggtcttggtttgataacattctttggttggatgttcctcagtcatgtattagctcatccccctacaatatttgaaatggcaggcagtggtggccgagtcatggtctgcttgaagctgtgcatttcggtcattgtctttgcgtgtccctgtgctttaggtctgagcaccccgaccgcagtcatggttggaaccggcgtcggcgcggaacatggtatactcgtcaagggaggtgccgtgctagaagctgccacaaaagttactcatgttgtctttgataagacgggcaccctgactacaggtcggatgagcgtggctcacacccgaattgaacctcaatgggcgatgaatgactggcgccgtcagctgtggtggcttgttgtcggtctcgcagagacaggaagtgaacatccgatcggccgtgcgatcgtttctgcggccataaccgaatcaggccacgccggagaagatgggttgccagggagcacgggcgacgttgacaactatgttggtaagggtgtctccgccgtcgtcgaacctacatctagtggccagcgtatccggcaccatgtcctccttggtaacgccagatttctccggtcccaagatgtccctgtacccgctgacgcagatcccgactctgcggaacctgtcgaagacccggaagctgacatccccaagccgggtgtcaccggggccggcactacacgcatccacgttgcaattgacaaccgctatgccggaaccatctccctccgggatacagtgaaagagacagccgtggcagcagtagcggccctgcatcgcatgggcatcacaacctccatggtaacaggcgacacgctctcaacagcgatctcaatcgccacagcagtcggcatcccaaccgccacaatacatgcctccgtctccccatccgagaaacgctcaatcgtctccgccctccaagaaaaaggcgagcgcgttgccatggtgggcgacggcatcaacgactcccccgcattggccacagcatccgtcggaatcgccctcgcatccggcacagacgtggccgtcgaggctgctgatattgtcctcatgcgcccggacgatctactctctgtaccagccagtctctccctctcgcgctcggtcttcagacgcatcaagttgaacttaatatgggcttgcatgtacaatgtcatcggccttccattcgccatgggccttttcctgcccttcacaggcttcatgctaccccccatggccgccggtggtgccatggctctttccagtgtgtctgtcgttgttagtagtctgctgttgaaattctggactcgcccatcttggatggaggttgagcgtcttgagaaggaggtccagtccggtgcaatctctgcagctggtgtggcgcctcgtaaggggagctggtggccttctactactattttctctaatagcccgcgctctctacgtcgtcgtgttgggaacgttttctcttcgctttggtctctcgttactggcaaaggacccatgccggctgaccggggtgatgatggttatgttccgctgcagacagttgagtcgcctgtttaattttgccttgtcgaattccccatataaagacttgtcctgtataacggcttacttttgtttgatgcctcatgtatttcgggcctagttttggcgttttgtttttgtttttcctcatttgatacctcctccgttaaggtcatttctgcatttgttccaagatcctcaagatgtaaaaagcccaaagacaaaagtaagggataggtacatcttgcttgtttgcctgttgtttaacgaaaagtaggttctagtatactccgtacgatctgtctcttccaatatcctattgttcgcgtatccagtggtaaggaatataagacatacgcgcacttggcactcctttcaagttataggatggagaaagaggctccattcaatacctgtagagctagctaaaatatgggtaactgtaacgtattgtcaccccaatgaaaaatctcgtcctcgagatctggcttgggtacatagtctcttactccagctatgtgccctgcttgggtacataactagccgcgtagtgccataggagctcggtgaatgaccacatttagggtgagaaaatgcaaagtgctagaaattgcgggggagaaaatagagtcgatgtatggtcgatctttccccacaaaaagatttctccacaacatagggtgcgacttttgacacactgtccaccatcgtcatcggattgtggctctactaggcacgacagatatcaatgatgcaagcgggcctattgaagaagacgggtgatttgtatctgatttctacctgttccactatcttcttacgccccagtttccacgtcgtgagtgttttactattttgcttgctatatgctatttactaaccacatgcgcttaccagcaccaagccaaattcggttgacttgtgaggatcccgcaatcctcgttcaaaaatacgggaaatacctccacagcgattcgacaaaaacatatcgcgtcgtccttgactctcagagactctcagaagtctttggcccttgggaatttgcgtgttgtctcccgagatgatctcctggaacgatatctaaatactatacgcgaacaagcaatcgaagctgagcgcctgaatgaatacttagtgttgttgatatttggccatggctccttggatcatcatgtttctgtaggaaatcatttcctcgaaatgaaagacttgcaacgcattctccaaggaaagtcactggtcaccatctttcctgttactcgggaggttgacttgtcaagccagattacagaaatcaacagatgaatgtgaccggtattacagcagcaggtgaagacacaaagtcttcatcatcgcccttgagtagaagtattgggcgtgtaagcggcagtctggagtcgttcaatgcctagtcgagatgcaagccgacgaagcccaaatgaacactcaaaaccccattgaaatgagggaaacaatgtaccatccgatgtaaatacagctagcagattctgtgtattcattctaattttaattctaatcaactccgtacttaagcttcatctacatctttagactaaacctatttgggactgtctgcctaaggcaacaggttgaccgcattggagtgcaaacagtgcaaacaagtgggcgggatgactccgaggcttttttgtgctcttctttgataacaagatcaccgcgtttcttgtgtgctatttctggagacggtatctgaaaatcccttctgaaatctctcagtttactttcgccaaccttcggtttaacgggttgttgacacatttaacgaaaaactgccctgccgctcttccaccggctattcacgaaaaatagttcttgcgattctctagattgatagagcactcgttgctcacacgcctacaacaatggcccccaaacagaaatctgggcaaaagccaaagcccaatgcggcggaggaagtggaagagaccttccaagctgtggtaggtctagcagttggcaaatgcttgcgtgacttctctatgtgttatatatttactaacctgtgctttgcttaggtgttcgcagataccttcgagacgagattcgagcccttcacccgtgacaagcctcgtgtatgttctacagcaaaccatctatgcccaagacttcgaattaacgaaccaaattattagtgccttttgccactcgcaaataccccgattatcgaatacaccctcgaatttctggccaatgcgggcgtggaggaggtcttcctctacggaggagcgcactcggatcagctggagaaatacatcaagtaggcttgccctaggactctccggtacggatggcagagctaacttatattgccagtgcatcgaaatggagggccctgtcttctccattcaagcaattgacattcctcaagtcgacttctacctctgttggtgacgttatgcgcgacctggatggaaaacacctcatcactggagacttcattgtcgtgagcggcgatgtgatcagcaacctgcccatcgaaggcgcattggctcagcaccgggcgcgtcgagcacttgacaagaatgcgatcatgaccatggttctaagggaggctggcctacagcacaggaccaagtccacctcaatttcgccaatttttgtcattgaccccactaaggaccgctgtctccactacgaggaaatcgaccgccatgcagacgaggagcattcctctcgcttgaacattgacgccgaaattatcctcaaacaccccgaattggacatccgccaagacttgatcgactgcagcatcgatatctgcaccccggacgtactgagcttatggtcggatagtttcgattaccaatccccccggaaacactacctgtatggtgttttgaaggactatgagctgaacggcaagactctgcacacatacattgtcaaggaccactacgctgcgcgcgtgcgcaacctgaaggcctacgacgcgattagcaaggatgttctctcgcgctggacatatcccttgtgcccggatacgaacctactccctggtcacacgttcacccttcgtaaaggcagcatgtaccaagaaacaggggtgaccctggcacgctcttgcgtcattgggcgccgcacagttatcggacaaggcactagtattggggaccgggcagaagtccacaactccgtactcggtcgaaactgtaaaattggccgcaatgttaagctggatggtgcctatatttgggacgatgtcgtgatcggcgataacacagacgtccgtggggcgattatcgctgatggcgtggttctcggtaagaattgtgccgttgcagcgggatcgcttctgtcctatggtgtcaaaatcgcagataacatctgggtggagagtgggaagcgtatcacgaaaactcgaaacgacggcagtgtgggcaagaacgatcccgcagtcgttggcgaaggaggcgagggctatgagtttattcacggcgaggaagaggaagatgaggacgacgacgtgagcgtagcctcatcgggacttggtatgtttttttctagtgtgcttcttcgggtccgcattactaatttatgctatccacagtgtaccgcatgcccaatctctcactttcttccgcctccatttcaacactatcatccgaggtctcaaatacctcctgggcacgatctgagcggagcagtttctccgccgacgaagattccgacaatttccaccacgatgcatcagtcagcttgttcgacagtctacgcgaaggcgtggcagcagacgtggtacagcttgagctggtcactctgcgtatgagcgccaacgcctcggacaaccaggtccgtcgcgctatcgtaacatcgtttatgaagcacatccagcagctcatggagggcggcaagggtgccggtccggcagtcaatgaggtttttacggcatacaaggaggttattgagcgcactctattcgatcgcagcaagggacaaaagaaggaccaggttgatctactgctcgcgctccagcaggatcttattcatcgtaataagggtgatatggtccttctctttactgccaagtctctatatgaacttgaccttatcgaggaggaggcttacggccagtggtggaatgatgagcggtccagtaactccgaagagatgcggactatccgtaaccagacccagcaatttgttgactggcttgccgaggcagaggaggagagtagcgaggaagaatccgaggaagagagtgatgatgagtagataccacatggttttattaaaattccaatatgacattccaaaattccttttacatatgtaattcaaaccctaggatatttttcattagagtcaaatatatcatcttctttgacaggctaccatgagtctttatcacgaaagcggagcctacaataaggctgacaagtggaatgattcatatctgagtcaatgggcgcctgaaagaggcggatatttagacatcagctgaccaaccatggaatctttatttacgaacttctacgaacgtctgattttgtttcagactcaataaaattgtagacattcaaatatcacgaaaatcgtaattccttcgaataccttcgagtaccggttcgagccgccttcgggggcaacagcccggagatcttacgcttccccactcccctctacccgtgcccgtcacaggttttacccagtggcgtctggcccgatctctcacttataacatcccccccccccccccctgtcggcacttttgccgctaccttcaccacgcctcccactacacgaaagagaaaggcggctgaggcgattgcggacgaggcactgccaaaagccgcccacggcttccggaaactcaatacatccgacaggttctcccaccaaagcgagtcaacagcgaccacaacagaaaccacagaaaaagaacgtctcggaaattccgacctaaagaacaagccccctgcgacacccactaccgccagcatggactctgacgatgatttcatgagcgacgtctccagccaggatgatttcttgggtacccagggctctgacgatgagagcttgggtgaaggtacatgcctgatcttgcgttgtttatgttttgtgcgactgtgtctcgagtatagtgactaacagatgtgccctggggagcagacttcgatgatctcgacgccggattctcggacgataaagacctcattaaacataaaaagaagccatacgaagtcgagttcaaggttcttgctcctgcagatatcgatcacgaacagcttggccaggtcaacgaggtttgcgccattctcggactgccgcctgagtcggcggcgattttgttacggttcggccggtggaacaaagaaaagttgatcgagtcttatatggagcatccggagcagacgctggaggaggctggtcttggatcgaactttgaggggaccgcgaagaccgagtgcatcccgggcttcatgtgtgatatctgctgcgaggacggtgatgacctcgagacgtatgccatgcgttgtggtcaccgatattgtgtcggctgctatcggcactacctggcgcagaaaatcaaggaagaaggagaggctagtcgaatccagtgtccaggcgaccgctgtaatcgcatcgtggactctaagtcgctggatctgctcgtgacaaaagagcttcaaggaaggtgcgtgtttatgcaggcaattctagacggaagcaagagttcgctaacacatctctcactacagataccgtgaacttctaactcgaacatacgttgacgacaatgagaacctaaaatggtgtcccgcgccaaactgccaatacgccattgactgtggggtaaagcaacgtgatctccgtcgcatagttcccacagtgcgatgtttctgtaagaatgagttctgcttcggctgttccctcagcgaccaccagcccgctccatgcaccctggtcaagatgtggctacagaaatgtgaagatgactccgagacggccaactggatctcggcaaacaccaaggagtgtaccaaatgtaactcgacgatcgagaagaacggtggctgtaaccacatgacgtgccgcaagtgcaagtacgagttctgctggatgtgtatgggtctgtggtccgagcatggcacgagctggtataactgcaaccgctacgaagaaaagtcaggcgcggatgctcgcagtgctcaagccaaatcacgttcctccctggagcgctatctgcattactataatcgctatgcgaaccatgaacagtctgccaagctcgacaaggacttgtacctgaagaccgagaagaaaatgactagccttcagtcacagtctggtctgtcctggattgaggtgcagttcctggacaccgcgtcgcaggccctgcagcagtgtcgccagaccttgaagtggacctacgcctttgcattttaccttgcgcgcaacaatctgaccgagatatttgaggataaccagaaggatttggaaatggccgttgagagtctcagtgagatgttcgagaaaccagttgccgagttggcaggactcaaggtcgatatcctggataagactacttactgcaacaaccgccgggtgattctattgagtgtcactgctgaaaacttgaagaatggtaaaggaatcttagatatcatctgagtacattgctaacacctgttgctaggagagtggacatttaacattgattggtaattgacaaaccatcttcagctttctctcgccggagactccgggcgagatcttgacgacgtgaacgacatctatttttttacaagttccagcataccttttcctttctccatcatccttgaccattaaaccgttgaaatcatcgcccttgcactgtttcgcaacagcaacggccagatctatccatctccaaggctatcataggcattttttttgtcccgcttcctcgaattggcttgaatagcctgcatgtatcctcatttgatgggggctttttttgggagtgtttttcatcagatttcagcttctctttcctcattgttttgagttcaggcgcagcggtcttttacagaaatgattattctcaggtattatagcagggtgaaattcccccattcaacgcaccttccctttgaccttactaagcgtagtgactgcccacatacgctcctacacaatataaagtgactctatcagtctctaagacagcccagactaatatacaccgcgtccgacctatcccatgacttgaagtgcaaggttttcccgtgagaaacagggggccgtcagcaggaaccaagccaatatagcagaccagatgagtttagttcgcggcttgtaggtccaccgggcctcggcatgccccagtcacaggtcgcgtgttctgctttccctttgtctgccaagttcgttgaaacgagagccaaagttaataatgcaatatgacatataatatcaaccaagcacacccgagtatgtatgtataaagggggtgggttatcgggggttccaatcgaaagaaaatccttctcgaagaccaggaagaagccaaagctccacccaacatgagttaggcgaaatgtggtcaagggcgaagacgggtttgtttagtagccatcttatctgattgattaaatcaggtacctgcggcgtacctgtaccgttggcgctacactgcgaaggtactggtatggtactttacataaaaatttaaggtgctggcaccaggatctgccccctaaactccgtcatcggaagtttcggagattttttactcttccatttatcggtacttacttgtacggggtttgacgctatacaacataggcctttattcttgcccggagctgtacggaatacgagttatgtagttcggccttttcttgtggtcgagttagtcccgaggcatggacgcatggagcagctggaggcccccggagtctggccgccgattctgaataagccatgcatacattctctagggctacggattccctctaagggattgaagtaaggagaataagtaatatagaatgagaataggtagcaaataggctctagcagtcaacagaacagcaataataagggtttttagagtatagaatacctaataattctaataatcaagctgggtggataattttcctagcgccgtttcctggtttttgtgtccaaaacacctaaatttccaattatttccagctattccgttgaaaggaaaaaaaaaaagttcttcttacatttctttgttcatttattctcccatttggttggctttttgttcttgtcgtctcgtgttggcattgtgctgttccttcctcgggatctctaacctaatccctgtttatctcatcttcacttttccattcctccgccctccgccgcagtcaactaccctcccttcctctctgtacgaactcttcatctgctacagctgcgccttgagctagcggaagctccatggcggcttccgatcaaatccccgggcaggaattcgagtatgtcgctcttagatcggttttttttccccaggcaatcgggcatcgggatcgcgggaatgaacgaacacagggacaaaatcatcttattttcgagtgatatgatctgctctggctattgctcgattgtccctgttgagcatcctgcttttttgtttgccctgttgtcgctctggaattcaattgtgtggcctaagctaatgcgatacactctgttctagctatgaagcccttcctcccaactatggcctcagccggaatatgctcgctggtgctttcgccgggatagcagtatgttcacatggctgtcaacggtgtttgaggattttggctgatcggattaaaggaacactcggtcatgtaccctgttgacttgctcaaggtaagcttaatttttggttgaaggtgttaagacttggaaaaggactgagcgctgacttgcaaacatcgctagactcgcatgcaaatcctgacaccttccgctggcggtctctacacgggattgaccaacgcggtctctacaatctatcgagttgagggctggcggacactatggaagggagtctcgagtgtgattgtcggcgcaggtgtgtatatcgcgcgaagtcccgggttaaagattcaatttctgattcgcgatgataggtcccgcacacgctgtctacttcggtacatatgagattgtgaaggaaatggctggtggcaatgtcgacgatggacatcatcccttggctgccggtaagattttcggaactgttgaattgatatacttgtgcaacaactgacatgatatcgtgcagctatgagtggttcggccgctaccattgccagcgatgcgctgatgaacccatttgatggtaagtgacccatgtggcaataaaccatgcccagctaactcctctccagttatgaagcaacgtatgcaggttcacggctcagttcacaagagcctggcgcaatgcgccaagaccctctaccgcaccgaaggtctccaggccttctacgtctcctaccccaccacactttgcatgaccgtgcccttcacggccactcaattcgttgcctacgagtcgatctcgaaggtcatgaaccccaagaatgagtacgacccattcacccactgcattgcaggtggtctggccggtgccttcgcggctggtcttaccactccccttgatgtcgtaaagacgctccttcagacccgtggcctcgccgagagcgccgaggtgcggtctgcaaagggtctgttcaacgccgctgccatcatcaagcgccggtttggttggtctggcttcctgcgtggtatgggccctcggattatatcaactatgccgagcactgcaatttgctggtacgttccattccgagactcggttctttaatatctgatctttactgactgcttctccaggacatcttatgagatggctaaggcatacttcaagaagcacctcgactaaatgaacgacttgatcctctcgcatgtggctcgccatgggtcccatcccatggacttgctacttgttcgatataccacgtttgtgtgtgcatcatataatcttactttggtctcttcgggcgacatggggtctgttcttttacaatatgttatggattggggagattgggcggagcccagcaaccctcattgtggcgcatcccgagccagcatcgctcggggtttgatcttgcatgtttagggcttttcatgaaaagcgtttcggcaatgtatagttttgggggaaacgggacacggccactttcgacttcggagaacaaatctggtgcttttctttcttattcctggatacttcgatgaatctcttccattcgatgtgtcctatactgtgaccggcgttggaaaaactctggttctttatttttgtttcctgagagggctgggttctcttgtggcatcactataacttatgtttttttagtatcttgcatgtacccatagacgttaggaattagagatgatatcttttactcaattgatttgtataaaaatgcgacgatgtagctcactggacgcatgcagttaactccgaaatcgacgacgtcacgcgaaaaatcctccccctccacctacgggagatcatcgctttcaccaactccgccaacttgtccgtgaaatggatacaggcgggcctgtatattccaaatgatgcgcccacggcctgcggattccttgcagaagacgtacgacgagtgctatctcgcgtgctccaccgcggtgtactttgagggccaggtaagttcactagtccgactgccgctccccgatgctcactgtatcagaacaacgaagacgaagcattacggtcctggagaaccgccctcgagactgtctaccatcacaatgcccgtcgagtaccgccgaactataccccgaaatccgaaaccgagaaagccctgcaggactccatccgggcgctggaggtgcaatgccgggaacgagtcgatctactgggtgctctacaagccagcaggagagaatctgcagatggtagtaaagagaatggtccccatgtgaagggcaagttagctatcatgccgccgccatcgacttccaacacccctggctggattggagatggaacaatccctgctgtgggatacaccgacctttccaaaccagccgccattcccggtcgccctgtgctgccgaggaaaccaagccatgagccaccaccagcttacgacgatgctggtccagcgaccctctcggcagctggcacgcctgcactgcgcgtgaactcgaactcttcgggcaaatcgaagtcgcgtggctccagtcccgagcaccggaaacccatgttgacaacactgcgtagcagcgacggcaagaagcacagtaagaaagtcaaggtcacatcaaagaagaaggacttgaggcctgctgcttccacagctgcaggcctagcatggggtagcatctatcgctctacatcgggtaagaagcctgtgagtgatgcggctctagtctcatcccgacaaagcgccgcccacgatcctagtttccgccgagagttagacccgaaatctagttcgggagacgagcctctgcagccgagaattcgcctctcccgagaccatctatccgcggaccacatccctgctacccattggcgcgagcctcctagttcatcatctccaaggagatcgtctcccagactacctcctcaatcgcctagtcagctgccgccgccgcggggtcctcgacctcaacctggcagccctaaaacacaacatcctccgcattcaatgaccatgccaaacccggctgactttgcctttgcaccacctaaaccatccatcaaacccaagcctgtggcgttacgatcttcccgtcaaccgacaagcgatccaatacaagccagcaagtcggagaatccttctcggagtatgacgcctcggcccgaccgtgaagcacattcctcccacgataagccgcggacaaaatctgcacccaggcctcccaaagctagcgaaacatcccgcgcttctccatcatcccctagcggtgatgatctccatcacggtgtcgaccggctggctatctctcaaggacatagccatagtacgatacggcgaaaagccccaccagtcaaacaagaacagacaccactgtcaagcgaccaagagtcttcagagcatcggaacacagcaagcgatgcagaggacgaggatgaggaagacgacagtgaaatcttaaaaatcatggaaaagttgcctaggggcgtggatccccagtcagcaaagcaaatcctgaacgacattgtagtacgcggggatgaagtacactgggaggacatagcaggcttagaaggagccaaaaaggcgctcaaagaagcagtcgtctacccattcctccgtccagacctcttctctggtctccgcgaaccagctcgcggaatgctccttttcgggcccccgggcaccggaaaaaccatgctcgcacgagcagtagccacagaatccaagtcaaccttcttctccatctccgcctcaagtctaacatccaaatggcacggcgaaagcgagaagctcgtgcgcgccctcttcgggctcgccaaagcccttgctccatccatcatcttcgtcgacgagatcgactccctcctatcagcccgatcatctggctcagaacacgaggcctcccgtcgctctaagaccgaatttctggttcagtggtccgacctccagcgcgcagctgcaggccgcgaacaaacaagccgcgagaagaaggaaggcgatgctagccgtgttctcgtcttagccgctaccaatatgccctgggacattgacgaggctgcacgtcgccgcttcgtccgtcgtcagtatatccccttgcccgaacatcatgtccgcgagcagcagctacgcaggcttatcagtcaccagcaccacgagctgagcgacgcggatatccaggtcctggtacaggtgacagaaggtatgtttctttcccgtgtatccttttttttttcccatgctctagttcgtcttgctaattgacattaccaggcttctccggctcagatataacagctctcgccaaagatgcagccatgggccccctacgtaatctgggtgaggccctcttacacacacctatggaccagatccgccctatcaaattcgaagacttcgaggcaagtctgtattctattcggcctagtgtgtcccacgacggactccgaaaatatgaagattgggcaaaagaatttggcgagcgaggtggatagagtagatttggatttacctcatcttgagcttttttggttctgctctgtctctattttacacctccttgtctgtggggtccttgtatcttagatagaattataaaaattcaatagcgattcttctttcttcttctgttagcttgaacctatattcaaacagccaaatgtgtcaaatttaaatttcagagatatatattttggaaccgacctgacccatcgactgatagtattacactataaaccaaagctcggggcatcagcaggtggtttcattgtacatttagatatgaattaagtacaacctgtacagggaatatatagatcaactcaacaacacccggatctctcctgttgttcgagggaacaacgatctcaaactccacttttcaccctcgccttcttcgtcctccttctcactggcttctgtcttgccatcggatttaccactccggccgctgacactagccccggttcccatgcccacatccactgttcctcgcgcctcgtcggcggcaataatcatgccttcgacgaactcgaaatcacgacagaatgcttcgactgcatcctcggtgacgctctggataagggaaagactttgtacgcgcttcagattatcggttgcgtccatgagcgcagatgggaggaagtcgtcgagttgttggctcgatgtaatcagggactctggttggaaggctgggagattggctaaatcggctagctggggtttctgctggtctggcttttcggtcttgtcttcggcggtgtctgagaaaggctctagggcctctaagagcgttttcagaccagaggcctcgaggaggaattggtgttgggtatcgagaagatcgttgcgtagggttgataaggcggcagaaatgggaggggcgtgcgtggagctggcgaaggggaagggtgacacagctgcgcgggctgcaaggagtatgtttgtgcggtaaatggactgcgctgtggtggtttggagttcatcggatgaggaccgggctagtgttaggaatggatcgaaggcggcccggaggacagaagtgaacgggttctcgttgttcgcgtctggagataaatcttctggtccgacggacgattcatatgtcttcatcagtacttccaggccttccaatgcttctagcaagaactgtggaggcgacaggtcgtctgatggagtcagggcaatgtgatcgcccgctaaggcgctgatctggtctcgcatcaaagtctcaaagtggccaagagtgaacttttctaagctctgaatcagatccaccaagtgcgattgttcgcccactagtctggtgaaagttgtgcggtagaaggacagcaagttcaccactttgtagcaagtaacagggtcgtcatggctctgaatgacaagctctattctctgccgcaatgatcgagacactccattaagatcgcggttgaccaagtcactaagtgccttttggccatcaaaggcaaccgcctggccctcatcgatgcgcgaccagggctcgctactgaggccgacttcaatcccgcgagcgagttcgtccccgtcatcaacaaacaacgactcgagagcctctcgctctgagacagttgtggaatgcacccacgcaagcatgtcaccaatgtaccgaagtgggtcatgcgctgagaactcaatcggtttgacagtgtgatcaccggcgccaggcccattggccccggaaacagcatcagtcagtgcatagtggaaagcatcggacagcacatagtcccgcgcctccgcaaagaaatccagacagctgtggaatagactcgggcgttctgccagcactcgtagagcgcgacggatcgtactgcttatgcgagggtcctctagattcaaggacctgaattctttttggatccatcggtagagcttttgatatgctgagttgaggttccgggtgctcagttccatcacctccattcccagtcgctggttctcaccgccgagcaagacttcgcaatcgtgatgcacttgcttgacacgagctagcacgtcaaagaaccgttcgtcaacgggctcctcggccgatgtcaagactagtaaatcctcttccggaactaagaaatgcttcgaaaaggcttccaacagctgttgcttggtctcggtctctttcttctgtgtcatcagggtgctggcctcctcgagtaccggcgtggtatcctgcttcgcgaggttgattcgtttgcgcatatcgtcgcatgtctggttaagtgttgagaccaccgttccgattcgtctcaattgctgttattgccatttaggaattagacttctggaccccaatctctaaaagagcaataggagtctcacctctgccacttttccaaagtccttgacaatctccgcgttgcaatcgacaacttctttttgcacatctagtcgtagttgccgacgtgtttctgcagtattatgaatgcccctcaagctcaaagtctcgagggagtctcgaatgtctgagtccgcatacgacgccgacagaactgttgtcaaccgattggtgagggcgttcgggcgctgcattggcggggataatgaagatgatgcggtcggcgtattagcgccattactggtactaccatttggtgggaagtagctggtcattgttgtttgagcaaaccagcggggagtcggcgaggggaagtagaggacaacctccgacttggcgcatcgaccgccttcgccgcatcttatcgtcaacacattactctacttatttcccctgttgattcgctcaatttattcagttctggaattgcattgctacctgaacgtatggatagcccactcgtttcgccagccaaggcccgccaggctgctattcaagctaaagattgggcgtacgtgaactcctggctcaatcgacaatacgcgcccaacccagttcccaagttcgagcgcaatgaagataccctacgtgtcctcctgaccctagctgcagcaaatgatgctgcagatgaagaagcttctctgcagcattgcgcgcgcgaagaggcggtcgaggcatacaaactacgggaagagttcgaacgcaaagatccccatgaacaagtgaagaatcaactccttgatgaagtggaaagttgtttggatgataaaggaagatgcgatctagaggacctcgccgactctgccgtagctctgggcaataccttaaatccgaccccgggggatctggggcagtcgattgtggagctcacggtggaggagttcgaggcccaggagcaaattgcaaaggtcgacacattgcatcggtatctccagcgagagttggtacggctacagacggagcttgaggaattgaagaccgatgtggcgtatgagacgccttccgatacacaaagcttgacgtcggaatggatacgcggcacgaagacacttgcgatcaaggttggggaataccaagatcgcattgcatcattagaaaaagtccaaccccgggggccaactattgaagagctgttggcggaggaggagaatgttatcaggatgcgggagacggtcaaggctctgcaaggccgcgtgagggcgttccatgatcttcccaaggataccccaggggcacgggcaaagtataaggagctagaacgcgagcttaaacaacttaggcgacaacgagattcaatggtagtataggcggcactaaagccagctttctacgtactttggtcttccttctacaacgtttggtctacataatgaatgaagcttctcccacttgaagatgtattcaaagagcaggccctctggctaataaaaagctgcaaatggtaatgtcaactcatgatgagtcttgggtgcagggctgcccgcaaagtcatggaatgatcatgataatgactactcacctaagggagaccatcttaattgccgccgaggccgagagcacccttagccttatcaccactagaggtagttaggatataaatctttggttccaataacagagtaacttacgctgacccagtggcaccactgcggccgtggttgtcactgacacgctggatcttgccgaagccatcctggtttatacccttgctatcatcagtcttcaagccgcgggtagcgcgctcggtggtgtcagtgacactctccttggacttatcctggttgggatcaggaatgatatccttcttagacttgtcctgatcggggtcagggatgggctccttcttggcctctggaggaagaagtagtcattaacgatgtcttaacatcttgaaagataaagcagtggcacatactggtggtaagatccttgcgaccagtgtcggacatgatgaagattgattgaagtttggtgcttgaaagtaggagtaaactatgtagtttggaagtataagatgttgacgaaggaagaatagccgaaagggcaaaaggggggtttatatagacttgtctggcctcattgtaacctctaaaagaagtgttacatgactttcattgtttgctatcatgatcggcttcatttacaatatacaccagatgcaagctaggcaatgtataactctacagatctatttgggccgggaccccggactaaccacaacctccagttaaaatcgcggctcttccaatgggcgtggttcctaagtcccagctgtatccatagatggtgccctttcacgacatataggctgtggcacacgatagtgctcggtttgctccagcaggctttctagaaatgacatcataaagatggctcgggccgttgccacgatattttaagttatgtacataaatcacgggactattcattatctatcacatgttttgcagtcacatgatacagtggcccacatttccaggggcaaccaattctaattggtcaacgatatttagcagaatgactcaccgcctccgtcacctgcttgggcatcaactgtaagtggtctgtctgtgatcaactcggtcgctctcattctcattttgactcacaccatgtgatctgttcttcttcatgcacgagattgtcaatttgatcgttatcgtcgttatcgcttcgttatcgtgcttttatttgctatcggccaaaccctaacacacccgctacatcggtctcattaaactgccaatgactgcgtcggatccccctgtcccttcaaattgggactttactccagtgcatgacctactgcagtcacccgctgagggctgcattgctagacctggtcgtcacaaagaatcaaccatctcctcgcttggtgaacaacaagccaaggatgatgtccgttacaccactaatggcaggcgtgtggatcctatcacccagcgcagtagcccagagcttggtgacttcggttctctttgggagcttctcaatgaggtcgctactcctgcaagtgtcacaccaactttagggtccgcaaagaccaccaagtccgagctggaatcgctcgatgaatttcttgctagtttagcggaaagacccacgaagagggtctcattcactggcctctttgacattgaaacatccattcccgtttcatacaacacccgtcgcaccatcaatgagccaaatcctcgggtcctcaaagacaccgccactggctacgctttccattcttcttctcggcctgaaacgcacgcgacaggtattcctaccaatctcgagagtccaccattcactatcttaaagcggacctcggttattgagccttctggaacgagtgccaatgtgaaatttggtgtcccacgaacacccccgaagatgattgccagagccatagttggtagtccaagtgatacacccacggcgaaatccaagtctcggtcaggcagaaaaagacccggaaggaacgcccgcaattgcccagtcacttctgaagaaagtgctgggctagaatcggacacaagcgttgtatttgatcattccgtttctgatagatctttggctatctttgtcccatctcaagtgcgtacacctggagcgaagactcaccgttatgataccccaccgtcgtcatttgacgatcatgactggatactgaatgacgatgccatgcgaggacttggttttggaggtactcatgtgcagcctacccgacagctatcagccgcggagcgaagaatcgccctgatgagcagactcctcgtccactttcctgattacgccaaagtcgtgtctcaaatgggactggctttggagtatcgtcccgataatgatattagctcacgtcctattcatgtctttgttgacatgtcaaacgtatgttttagtcccccctctacccaacttttctcaagctaactcacctcagatcatggttggatttcacgattcagtgaaagcctcgcggaacatccctccctcgacccggattcctcgtgcccacatgtccttcgccaacctcgcattgatcatggaacgcggccgtcaggccgccaagagggtcttggtcggctcggaccatcttccctccgtcgatgaagctgagagactcggctacgaagcgtgcatcctcgaacgtgtgcacaaggtgaagtcgatcacaccccgtcgcaccatcaaatcgcagaagtatgcctccagcttccagggtggatctagcggtcctgaaacggtcgccacctctggagagcgatgggttgagcagggtgtggacgaaattctacacctgaagatcctggagagcattttagatacggtccacccggctacgattgttttggccacgggggatgcggcagtggccgagttctccggcggtttcatgaagatggttgagcgcgggcttcagcgcggctggaatgttgagcttgtcagcttttcccagggcactagcaacgcgtatcggaagaaggacttccgcattcggtggggagaccagttcaagctggttgagctagaccggtacctggaggaactgtttgagtgaatggcgaagcctgactccgttgttaaacggagatttactttgctatttcaattttaaatgcaatcacgacacctttgttagtaatgactcaaattccttgaatctgtgactcgagtcgtttaatgtagctcatagtcgtatactccggattgagtcaactccccgccaaaccgccagacgtcattgggcggaaaacacccgcccgcacttgttgcctcatgcacgctcgtctacctaaacgactctccgttctggaactatatagtctctgttgatccgtgctactctccagtattgtttgtcttcttctatattgtcgaacttcaggcaaaagaggaacagagaaaaaacccgcaatttctctcgaagaatttggatttgctcctgcacaaccagcagaacgtccttgcaaaaagaaagaaaagaaaaaagatcaaaaaagatcaaaatcggccttacaatcaaaacatatcaaatccaccatgtctcaattcacagagcaagagttcttcggcggagccattcgaggcgtcgtgccacaaggctggattgattcgaggtcagtatacaactctccaatgcatcaagttcccattttatcactccaatccattcccaataccatcccagaacatcccaatcaaaaagaaccccgaaactaacacccaatccagcactctccgcgaggtccccgaccaccaagagctatggctctcaccaaccactctctccaacctaatcatcgaaatcaaccagcgcgtcccacaagacgaagctctcagcacctttgccacgctcaaccagcaactcaccgccgccccaggcagcggtagcgctgcacccgcaacgacagaaactgtcgaccaagccgccgccctgcaccacctacacgatctctgcgacgaaggcgacaccatgcaggtgatcaagtcgcccacgcgcgtcgacgtccagcttgcttcttcctcgcctaccccttccggtgtccgggcgtatcgcggcattgtgtccttcacgacgccggtgcgcggcggcggtggacgcatccctgcgtcggctgaggggtctgctgctggtgttgcggatgccggaatgttgggcgcgcaggtggatgaggtttctaatggtttgccgcaggtttcgaggttgacgtgccatttcttgattgttagacttgaggcgcaggatacggatttgttggtcttctttaatgtgcctcatgaggagtttgataagactggggatcctaatgggttgtctgttgaggaggttcttgctgaagagactattggggctttgactgggagattgcagatttgtgattggggtctatttgtttaggtcttatggacttggatttagacggcagattgggactgagcttggggagatatggttgtgatagctgggatttgggacagacaagtgccatttgcgctttgagacgagtagataaaaaatgaaacattgacttccaagcttatcttgtatgttaaaggaccaccagtgctttaatctatacataaatcaaaggttgtattgtggtatagtgctatctagtaaagttctatagatctagccatttcatagtcggcgactctcatatatccatcggcattgcagtccattctgttgattcgtcagactcttcagaaacacaccgttcacattggcacacaaaacggaacgattttcgaagatgctcgcgacgcgaagtaatatccgtatattgtgttaggtcgaagtacgagatgcaacattcctcgcccggaaaaatatcgcgggaggcggtgaagaccatgcggcctttatcgtcggctttatggatgatctagtggtgacttagcattacactcacacatttacacctcgggaaagaattccacttacatttggcagacatgaatgattagctatagccgcagtggggtaaacagcagcagcatattgctcccctctatcgaccggaggatttggcagggggaaatggcctgtttcgcgtgggtaaagaccaaatgagtttgcttcttcctgacaaatgagatgaagaacacgatctgcactcatctcatggggaagagcgggattactccggagatacttcttcacaagaacagaccaagaccggacctcgtcatgaggccaagtatcctcagaaccacagagcgactcaataccactccatccatgcttccaatgccttgtcgactcaacgacaccaagcgctgtccgtccatgcaattgacaatgtcgcgcagcaagtagccgaagaatgacccacagcatgccgaaatcatattcactcctttttgaccggatagtgcccgcataccgtttgagccaagcacattcaaatccatgtcgaagactatcagcgtcacgacatgtgctaccgcaccacgtcacatccgggatacaggcattcggacatggactccgggcatggcgaggcgccggccgattacatgcaggattgctgcagatgagattgtcgttggtagcgggttcgtcgacgaccgggatgactgcgtacggggaatcgacgaggagacaggcgcctttggggacgggaccggagacgcggaattggcggcctttgatcgcgtcggtgctttcgattagctgtgggtggatccaatcgggctgcgtctgggtgattcctgttacatgaatccggtccgagggttccgtggtgatatatacgacttgagacatggttgggttgggtactttgggggaatgtctaggtctgttttgggggtttgtttaacgtcggtttcgacggcaaattcttttgcgcgtccattattgcgcaggttttggttcctggcctgtgggtcgtttgattcgcctcccggatgtaagggcaatgaagttatccaagcgactacgagtgattggggtcccacacacgggcatagatttgttgactttattggctgatctgtatttttagcggagtagcttaattgatccactttagatgaggtagtgcgtagatgatagtagcatgttatataactagcttctctgtaaaggccttatcaaatgtcacagcagattgaaagtacggtatggcaacaatgactgaaccaggatacaggttgaaggtacatgtatgtgagatctcaatgcacctacagccacgattcggtaggtgttgaacaccaccttgacatcgacacccttgtaactaagtttaaaaggtagtagctgtataatctagaaatataggtatgtagtatacatttgagttcatcttagcttcacctgataatgactagtcactgaccctgcggagaagggtgagctcgtcgtcagtgctagctaactatatactaaggataaggtaaggatagacatgtatatcagaaacttccaactccccccctacgccctcgcctggctcagcatatctgccgagcactcgtcggctggctgaaactcctgaagctcgatggcattgcccccatccccatcctccaccaccccatatccaacgcggaaaggcagctgataaaaccaaaacaattgaaaaaaaaggcttaggccatcagggatggccataatcaagaagaagaaaaagatttgtgatatgttcaacaggctaattcatccgttgtccatcgtcaaggttggtccacgatgatgattcattgtatgcgcccgctgtggtgttcggctgctgttggttgatgtctgggcggacgagccagccaccagagtagtatgatgtactgaatatggtggtggagggcattggttgtagtacatggcggaggtctttcatatccaggacagagcctccgacctctatcccatgggcactacaaagattttacttttttttcttctcttttcttcaggaagtgtgaaggaagggttcaagctaacttggatgaatggtaaagcttcgtcctttgatgttgattgtgttggcctgtttcacacactgccacctcgttcgacatggtaataaacccgcttgctttgacaatatgtccaacgtgtgtaaagcgatgattattccattgtgatggtgtgtgtgagaggaggagaagagaggaagagggaaagagggaaaggccaataaatagtctacgtagctggatgaagctctaaaagaggagtctcgaatatggtcctaatgttctgggagttctaagctatatgccattgatcgcactacctgccttatactacaatttacttcaaggcatgcaagcccctctctcgcaactcccagcggatatgggcccgccccgagcgcgttcgcagagaatatataggcaacacctgcacaatataggttctttgcgatgtgttgtctctcatatctcgttacttggctctcaaattcgtactttccgcctctttggtgcaccatctcaaatgcgcaaagatcctccaatatacatcctcggccgcatcctttcctacaataggatcaagatgcccatacccctcgactaggaacctgcgatacagtctctcgccgaatcgacgtcgcagcaactcgtagtccttgagcgtagactcaggactgaaaacttggttctccgtacccgagacaaagagaatcggcaacccttgcagtcgctgcaaattctcatctgtcagaagaggacatgaatcattatccatgcaaatcccccgagttcccatgcgaaccacgtgtttcataagcttcgtatgtgtccccgcgaaaaattggtgaacattgtcatgcagactcatatcaaggttctcgtgattccatagtagcccaaaagcaaaagatgtccggtgacacgctgtagatgtgcagatgtcccgcgtgtgtccaacaggatagagacgaaggagcgtatcgagtaatcgttggagaagaacactcttagcactgctgacaatcgggaagtaattcccagccagtaattcgtagaactggatcagcagagtcgttctccccttgagggagttccagtacccaaagacctgattcatgaagactgagttggcagtaacgccgagaagttggctactttggatggttccatccagcaggcccatgcagagagccaccgagccttggcaatgggctaccacatagggcttctgtcgctctttgtcgcgaatatatgctattgcagcagcaacgtcaagacggcagtcgaagactgtgcttttctgcgcaaccgcgggatcacagccccagcgaggggtgagtgcgtagcatcggtgtccacgctgtgtgagatactcaaccatgttgcagcgcaaaaatggcagtgaatacaaattgtgcatcgcgccgatcccagtgactccgggtagaagtaggactggtgcaagattgcagttaggtcctggctcgtctgtcttttgtgcggggagtgggtcatatatatcaagatgtatctgtacgccatcgcttgcggtgacattgcacgaggtagaaggtggttgttttacatcggtgcctttagttgagatctgagggaagcgcatgcggacgaaagggcgaacgaagaacaaactgatgtggtaaataaaagaaaccaaaaaccacaccaaggccaagataagactgatctggaagtcttttgtcgtccgaaatgtccgcatctgcttttggaagtctagcaatgagatatgaagggcccctgctccaatagttgtcccgtccagtcgagtgatattgacattcaccgtagttgtcgcttcccaggtctttctggcggaaaaggctatgtttgtgttgatcagcttgtggcctttcaggcggtactctatgccctctaccgatagcagcttcaggtgatatgatatagctgatgattcggcattctcctctattggcgtgaaaaagtctaccgttccttcgacaatcttgagcgtggctctagataatgcgtaacaagaaatcgtcccggtgcatattccttggtattgtgaatctgtacatgtgagcattctactgccagagtgctctctcgactctcggtttctcacctcggcagatttcgatcgtaagaaacatccgcatcgcgcaagatgagccttttcctaccctctcagaaagcgcaaaacttccgttatccgaccgcatgctgatgtgcccatgcatagtctctgtgaatttccatcctatcgactgcgatgttttctcggtactgtcttgatggtcttggaaatcgcacgatatactaggcttgcagtaggcgtttaaagtctgattttcagtctcaatatcaattgataatccagatctctcggtaatcaaactgacggatcgctcggagagggctgatattgtgccgagtgggttcacgcctatcagaatcagcacatagtaagccataaatttttacttgcaacatacccagggctgtcgggatgatagatgcatcacagcacacgaggcctttgtatacttcaccattagagccactgaaaacctctcctagatgatttgtcacacccccatgccctgttccatcgttgctcatgttggctcctccaaggagatggactgtggtttcctcctggtgacgacctttggctatgtttagcgcagctttgttatggcttttatcgattgttaccgtaaaaataggaaaaccccatccttgagcctgtgcgagcaaaactctcattgaaaaggttctttatccatttgaaatgctcagatcgcccttctcccggtccccggaggtacaatcgatcatccttcaagatcaaagttatctcgttgctgtcatgagacatcaccagataagttgaagtccgctgaagagctccattgtatgcatacggaccgaatagcagagacttgagagaggcaagggtcttcttagcttcttggcgagggttccaaagacaacacagcgcctggctcttcatagtttgcagggtgagcatgatttggattaccgggttgaacatcgcaggaatgcaaccatcttggataacatatccagaaagaggattgtccagaggatcaacgactcggttatcaataacagcagtgactgttgttccagggggagcacgcgaggattcaccggcgatcccgttgatattagcatatccgttgtaaccttgaatctgtaaatcaaatgtgctcggactgatattctggggaagtacgtaccaaatatcaaaaagtccccatttccagagagattccttccaacaagcggtgacatatggaggccgtgctgctttgaccgaagcaagacttcagtagttcctagagcgccagccccaagaaaacagaactccttctgtgattgaagtagaaagagtgagttgatatgtccacttccgaagtgaattcgatacttactgctttgacccaaaagagttgttccttgaaatgatccgcaaacaccgacctcccacttccatgccaagcaaagtgtatagtgtagcctcctccgtccatattttctacaaatcgaacttcgcatccgcagaatatctcagctccccaattccaggcatctgcaagatatgttgtcgccaccgagttctttgacccatcgttgagaccagtgcactcatggcctgattgtctgtttgcctgcatagggacacctgcattgttgcagccattgtggaaaaatatagtcaacggtactcgatagaaattattcctctttcctagccatctcaactcttcttggagatgcttgagtttgtttgggcttaaatcatccgggtatgtggaaggctgtagcattgtttcggcgcgtgcgtagtctgcattggttattatgaaatgttctccaccatgcatataaaactcacgttcgtcgagcgcagatggctggtccctgatctctgacggccatggactcatctgcaatgttctcctatccgctttcaggaaaaccccggcattgatcaatgaagatcctccaagtcctatgcaatatagaaaaaggctgtcaggtttccctaatcatcaattctagggagatgttgagtatcacataccatgagcagcaaacgaatgctgtccatcgcctaagaatacttggaaaagccgcgtggggtctccaggcgacagccactttgaaatgaaggagccctttacagaactccccgagatgctcgtgttcttcagacattgagagaacgtttgtggaaatgaaccggcttatgggaatgttagcgatggtatttgcttgacgctctcgatccgtacatcttctttcccagccaagctctagcactgcgacgctcttccctgctcgggccattcgacttgccgctactccagcaccatagccagatcctattaccacgacatcatattccggcctcattgatctgaacggacgactcaggttcgggtacttgtccgtcctgtctgtgaaatttgacattgtctctcgctttgagtggaaaatgaatccttagagacacagaaaacaagaaaccgacatatacgtttttgggatgattaggccgatataagcacataagcactaggattcgaagagtaaggattgacacgtattttgcacgataacgcggacaagtagaaattgtcgcatccgaaataggcatggatgagccctgagctggacaacgcctattggctatatttgtcgagttattcttagtccggggtaatctcgtgttgacaagcaagttagcatgaagcccaattcaaaattcacatgatatgacattatttccaactccaaagaggtaatcctgattgtagatccggacaagtgcttatcgaatacgtgctcactgagtaactagttagcctaggggtgagtagtctgcatcgctagtcctatcacgtgcagccctccacttctacaaggcattaatgtaaacaatgcaaaccagaactaatgacccctccatgcatatgctcggtgacttcaaacaccaaggcaccagctgattccaccttccttagctatcgacctaaaaatatgctaccagacgattcagaatgtggggtactcgaacgcgtacaattgacgccttcgatgataccaaaatctcccaattttgacgtcaaagattcccaattcttcagaaaattcaccaagttaccctcaccggaagaagttcgcttgcaggccaaagctcaacatctcgcagaagtctgtccagataatagaaaaaccttctcgatgactggctttaattaccgaacaccacctgtgatattcgaggatctggggctgtttgtcaaatggggaggcattgtgagaacttccgagggtcagtgcctctatgctctcggccagctccttaaagatgatatcccgattccggagatatacgggtggcgggaggatggcggtgaaactttcctttatatggagtatttacaggggcagactctggagcaagtgtgggataatctgggacctgataaccgcgtttcgatctgttatgagctccggacaatcgtcaaccacattcgccgccttcaacagaagccaggagagtcattcgtgggtacgatgctcttaacggcctctttatttcctaaactgcatccataactctttctccacatttaggtgatattgcacaagatcatctatatgatagagtattcgaagtcgagtcgcccgaagcaggaccgttcaataccgtccgggaattccatgactggttcactttcctacatcgaagaccaatgccagatccatatattgtcccaatcgaaccgttccgtcaggacctgcctgatgacagtgaaattaaatttacgcatagcgatctccaccgaagcaacattttgataacacgctctgaaccctatcgtgttcttgcagtcgtcgactgggaacagtctggctggctacctatatactgggaggccagaaaggcgcagtatactgctgacactcaggaatggtctaaaaaatatttgccaatgattttatgtcagtataccagcacttgggatacgtgggcctactacactgcggccctgggagtttgagatgttgagaaaggcagagtcttattgttctggcttttattgatctcttttctgcacaagataaacggcgtcgaaatatcacccagagacagtgtttgttaaatgtgattggtttttagctcaccaccaggtattaggtctaccgcaagtctctcttcatttttccttcctgcttctgatgtgatgttatttcaacgaccaagcaataagttttagtatcttttttcgtgtcttcgtagatccgccggccgagattgatactatccggaagatggtagcgggccataatgccttcttgaccatgccccctttccggaataccccatggtcgatttcaacgataccgagcccttattatcgctcgcattccctactctctttccacgtggggcagctgagttcgtgacacctcgcttgagagccgtgcgatagagtgacgatatactacaccttaccttatgaaacacgagagcggccgctttgtacagcatctacgattccgctatgtggtattcaataccatgtagcggcggcaggcggccaagagtgcggggttctatgtcaattggcagatagactggcctaatatcacgattgaggaactgcaagatatgttcagtgaactaggtagccctatcggagagagtaccacctgggtgcaggctattatgaagtctgatggatggtgcatatactggatgttatttatatttgaatgactatataagactcatgggggaaatgcggaggatgagagggagcgcaaagactgtgctgcctattttggtggttggcctgcttgaacaggaaacgaagcagacatttgccgagatcgggaaacttccgtgctcgaaagaaagaatacagatagctccgatgacactgctgtggagtgggagtaccgttaccaactgcgtgatggaatccggtcaagatactacttgcctccgtgaatactgaggcctgtgacatttctatcgaataggctcgccagcagggcatttttgactatagacatcgcaccttgctattcccgactttactacaatgaagcacatcttcttctcccaatatcatatatacataatatacttagacctgatatcctagaaaaataattgacataggtagacattcatatgttcattaaattgggctcattgacaatcccactgccactgggcatacccaactatttacaagcataaacgggttagatatcaaggatcaataaccacaatatccttctcctcaattggcgccttaacaataggcctcttcggcgctacagccctcggcaccggcttgatctgctcaagaccgccccggcaacggccgcagaagtgacgcttggggtcaacactcttcgagtgtcgcccgactgtgaacccacagccctggaccttacaagcccatatgtatttgtggttgatctcgtaggtgtgtttggtcgtgacctcaacccggcccccgtagatagggtggccttccagtgcgcggacacatcgggcgccccattgcttgaagctggcgccgtgctgcgccgtgccctttgtccggttttcagtgaccatgatatcgaggaggtggcagtattcgtgtgtcatggtgcagaggatcttgtcctcgctgtccaggactttctcggagagctcaatggtggcataataacgccgtttctcggggtcttccacgccggatgctcctttcaggaacctttctgaacggacggttgcccggccggcggtgtttcggaaattctttgtccagatgattttgatgccgccggtttgctcggtcatgcgagtaatctggtcattgaaggcactgtcaaggtgccggaggaactcttcggcaaagccgatcttcttttggttgaattcggctacttgggctcggatctcgcgtttccgcgctgcctcggcctttttctgggccttgatggtggtgggagtacccatgccgggcgacctgtcaattgatatgatagagcgagtgagagaaaggtgaggcttcgctcgtgacggtgtcacaggtggtagctttgtatggcttaggtagggcttcgatggtaattcatcctctgactctgagctgtgagatgtagttagtatgttggccgctgccagactatgagtgcacatgaatgcccacatagaacttacttgcactgttctggctgcgtctgtgttgtagactcattgtcactgttcaggtcaagctcctcgaggtgtttgatgaggtcgctagagttgtgcaggccgaaatgaggtggagagcatgaatcaacatgcttaggtattcctgccctacggataggggatgaagatttggaactggttgcaggattcggtgtgcagtattcaggcgttgagatgactgcctttggtttctcagttgatcggtccgtctcttttaccaacttggtcatttccattgatggttcctcatctgcagtggtgttggattctgcttctgatataggtcgtcttccacgcatgagtctttttcgtggcgacctcacaggcgatggaaccgggctaggttcggcttctatgtcggctgtctcggaatccgatgtctcaaaggagctaagctcttcattgtcactgacaatgaacccgtctagtgagtcagagctatcttcttcttcaaagctgaatcctggctcctcttgttcctcttggcggtcaatcacgggctgtgtcgcggcgaaataattcactctgcttcttgtgggagcctgtgtggcaatcggccttgttggcgttgaatctggagtgcgatgtccatctgtggtgtatcctgccacatcgttctctttgtcgtaatcttcagtctctcttcggatggcggggcgtggtctccgctttgctggtaggagtaacgagttcacacgtgcgagccctagtgttctgtgcttttgctgcttttcggtagacttgtgctgtccagattcactttccgatgctgagtcgctgtcggggaatatatcgaatgatccacttgaactctttgcttgccgttgcgatttttgcggcttggtgggcatattgtgtttgactttgttcccaagattgagacatggctctccaggtggtgaactgttgtgagatttccctgtgcgtgggacagtctcattgtatggcgtgtttttgactagaggattggctgtattgacccttgccatgatcgcgatgttgttctgatggcacaatcttcgtggtgttaatcggttaatgatatcctataggtgctaatggcgatgatgatgatttctctaaattagttgaactgtgtttgcgctgaccaggtcagtgccggagaccccggtgtttttcgttgttggtgtcatgtctgttcagctgtcaacgaattcgttggcacggcaacgtatgtacccagccaggccccaactcttggcaaatcgggaaacctcgatcctttcctatttgtcggaggctgaacatggcactgatccgatagtcgctatatcacattcgcataacccattgggactttggtgttgtattgtagacaggcccctgcgcctctgctagagccgcaacagcaaggaaacattgccaacaaacaaaggcgtgttgagcaggtggtgcgttttgctttcatcagtgttcagtcaacagttactacaatcgccgcggtagcctattaaaatgtactctagtctcctacaacaaatgttgcaaagtaggaactacatcgccttcgctatgaatcgatcttcacacttgttcatttcgatacatatgtgacttccggattctccattactatgatgattgtaattcttccatacggatttgaagattcacgcgaataatagaagaactttcgacggatattttcttccagggtacattgagtgtgcttcgctgttcaccaagtccatccagttaaatccttgacccagtccgtcttcggagatggcttagccaaacgaaacagaacgtagtacttgtcatgccactcttcgtttgcatcagtacggcctgcgcgtgaaaaccccgagaaatgcctaattctgtcagcttatagtgctctccattcaacaacggataaagcgtacatattcccggtggccttttcatagatgatcttcgacatagttgacatacgcggtagataaccgtgcttcttcagctttctaattttcatgtcaattgaaagcacgccaggcagagagttctgtagacttacggaaaggcttcacgaaatttatcgcggatctctcggcgcgactcaatttctagcccccagaattcttcttccctgagagactccctgggaactttgtcccagaccaaataagtgatgtactccggaacgatactatcttcgccttgctctctctcttggtaagcaaggaggtcagggacaacattgcatccatatttattgagcactttcaaggtcgtcaactcaacgtgcggttgtggcttagcagcctgcttttgtcgaatttgagggctctgatattgagtgccaatgactggaatttgaaaataaatccgcataaaagctttcttgctaggatttcctttggggggcagagaaacttagcagctgcgtacggaagtccaaggccatcgtcaacgtcttgctgcatcatccattcagaccgttcagagagcgtcttatcgatcacccaggtctggcggggcaggtggagaggcggctcggatggtggatcgagagtgatggccgtgccgtcgaggccgcacaggagctcggcggtttcgggattgtccatgctgacttgataagctttgcaacgatggatgaagacgtatttttggtcaatgaaaggttagtacagctggtgtttgaacgagagtgaaggaaacgacagttgttgatgggaaatgcaaagcgtagacctcctcgagctctggtagactgggtgttagggttttggcacccacaacagcttaataataagcaagcagtccacaatggttattccaatccttcttgtactctctaaggaagtgtcaaataatggctggactaccggtgagattagcctacgttggctacaaaggcactttattccacatacgaatttgatggccacggtagctaccttacgccctaattcgaccgaatctactccgtattccgtatacatcgatattatacctccactgcgaatcgttatacaacactgcattgcttgtacaggagaacatgaatctacgcatggcaaatgagaggagcgttaagaagcgcgctcggtcaactagacagaataccatgcgaggaaggtttaaccattaaaaatggcctgcagctagttgcgcagttagatttacccaataagtagcccggactggaatctacttagtaggtctcattaggcacttagaatagaaaagcccacctcgtaggggaaatatggtacgtatctacaccatctccgagtgtgtagtgcattagttcattaatatggcattatggtactcctaccgtatttgtcgtgtcatccacaacactactccaaacaaggctccaatattctttagggaaagaaaagtttgatggttgttaaccttagaagttgtggttgattatatatcggatgcaaccatgacgaaatatataactacattgacagcaaaaacaccaagacaaagtctatttatatgactgtatatactgatctaatatacgttatgtataatgagatcaagtatggcaaccataactcaaacatacaatggatgaagctgtacttccacatagaatctataatgtagaaagatatgcctcctgtctacattgagaattaataaatctgataacaaggtagccatggttattatagcctatttacatataacatacaaggactaataagcgtcaactaatgatcctagatgggtgaaacccagtcccaaagccaaaaccgccgaccgaacaataaaaccatagaagggagagcggaccaaaaccaagccaactgcagctctatgacgtccaatcataaccagcacgacgagaacccgaagaccagacgtgcccaagtcttcaaaggtctcaggtactatcaagccggcctccttgctacaggtacatgatgttctacacggaatggatgtacttccggagcatgcggatcgcaaacggagaagccacattataccgcatggcttgcaactgaggttgggctcctggacggctggacggacctggatcgacacgggcagatggacgttgaccagccattccatcgctctgccgatagagatcggcggccccttgcatcccagcacatagtggatatgcctgactcgttgcaatctgatcggatatagcctccgattggtgagaggatgtgccagttgttcgcatttgtagattgacatcactggtgaacattcctggctctacttcggctggagatgggtagtaatcggttatttgtttagattattcggtgcgagatggcttcgatagaaggctagtgcaaataatgtggcttggatattaaaaatagaggaaataaatgatttacagagagagagctctccatatgggagatgaccatctggagtcctcgggttgatttgttctgctagccttaaggaatatattgtagaactacactatgaaagagagtatactaaaagtaagagacgaagtaataggtacacgctgtactagcacacattgttgagtgccactctacgtgctcatatcatgcgattgcgagcgaaaacgccgcaacagacacaaatttgaatgttgaatcaaacactgagataagacaatatttgagcaataattggcgcttgatagacatgtctcactatcagggatacagcataaagtgatgttgttgctttttgaaatttttgatctaagtacttctagttgtatatatatcgtgagcgagattgcacaaccatattcgaggactggcggagatagcataaaccatgccataaagccataacaccgtactacaatgtaatacctgctaggggcaaaagtataccctgtagtcatatgttaagttctttatgtgaaaggcgggaatcctgattgcttgtttgaactcccatggcattcgattggctacaatagtacatactaattcaaaactccgtattccgtactccatttcgtgcatagacgttgttgtacaagtcatgtggtgcggcaagcttttcaacagaaattatccagtactgttgtacctgtacggaggactccatatatggacacaactacggcctcaaaaataggggctgtgattggctcctggtcatgacgcagacggcggtggaggataacggcgcagaggggcccgggtcacagccccctaattataaattgaatcagtgctcaaggtgcggtcaactcgactcctatgtataactatgataatcattagaggtgccttataaatcaatggatctactgtagagatcgaaaccctttcacggggagccagtgcgaacattgaatataaaacgccctattcaggggccagagccaaaaataatcatggaagcgcttgtatggttctagaaaggccaatgccatggctcccctatgtactccgtaggtccaagtaaactattttctaattaataggggtacgataaataaccctgaatcatttgcttatatttagccacattgaagcgctgtcgtgctagtgtagtgtacacagtattgaaaggtgacgggtcaatacgccacaatcagtacaataaatgtgcgacactagggcacgcctaccggctaatgatcgctgactaggccctttaagaccgatttcgccgaagattatttttggtgcttattatataggagtgcaatccaatcgctatcggcttcttgagagtgtaattgattatagggtcaataaaggccacggtaagtggatagatagcgaaaacccacaggggaaaacgaagatcagatgtcgaagatcggtgcttatgcagctgatgtgtcgttcctgtacctgcctccactaatatgaaagtgtacaaggtacaagtactcaaagtaatactgcagtctgcgagtatatatgtgctacggcatacccgataagcattggcttgcttgtgcagtggcgttggtattgcgtacaactaacatacggaggatggagtacaatattttatggagtagacttctgggtcgaggcttgaaagaatcattaagaaaaaggaatcggtgatccacttgtgtggacaagatgaaatcccgagtctaacggtggagatcttggaataccagttctaagatacagcggtatgcatagagtctcaggtgtattggtacatctatatacagtacacagctgtgttatattgatgtatctgtgacagactatctagattgcacagaggctaatgcatcgataaccttggaagactaaaaagataaatatagtcaatgacgattgagttttcaaacgttatttagcgagtggtggaagatcaaacaaggctagcaaaggctgtactgccaggttttctcgtggtacaggatccaccgataacatccactatggcctccgtacgggggagtacatgtatgggcttgccagccacagaataaccggcagtggaaagtcaaatgtaatacacatgggactgatcgaccagatttgagacaacttgtattgcggtggcaaatcagcaaacaccacaacataaaaaaaagattcactagttatgaaagcagcaatttgaatagaagatccagattcaacaacagaagatatacaataagcagtctggtagcaaaggtggttcttgtcgcgggggatccatggaacggcagctgaggacacgaaggccacgggtcagagctcaagctgatattaattttatttgagcttcgaatcagattgaagaacatcaggagataataataaacggaatgtaaaatatgcaaattactagttcacttgtatggtccttagttgctactggtcacaaattccagaggcactgactcgccacataagcagatagataagtgtacgtacccgtacctaggtacaatatgtacgcagtacgcagcccgtacattgtggcgaacactgtgagaggcaagtctgaaaatggacgccctctacatagtaggaatggaaattgccggtgcaacgccatccctacataccaagtatagtcaccatagcagagtcgacgaatcaagggcatttttggaacaacaccaggtatctctgaaaatagcttccggccacattatttgttaccggattacatgctggctgggtcgcggtggggcaagtttcaggggccgtcgagactcccttggattccgagtgtccatgggagattgtcattggatggtgagaggggagattggggaaaggtgaaaagtgatcggggaaaaaacaacagcgtaattacagacggacgatatcggtaattcacaaatggtcgatcagcgagagacacagagagagagaaagggaaaggcgtttggtgaatacaaaatacctgggagcgccaataggctgaacttaatgcgccacgtacggtaaacaaaggggggggttgacagtacctgggacaaataggggctaaccatactgggagcaggtatccagtacctgcaactctgacacgtaccctttatagctgtaagatgacggtaaattactctggagacggagccagttcccccccgacccaaaaataacaagcattttctggtcttccctttccaacccccttccattcgctttttgtttccatctttccttctaatttgctatctttcttgttctttctttttgaaggataggagggaggttgctttgctcttcaaacgttcccattgcaccttcctttgcgtgaaactctcacctgccattcgttacggagtctgagactcgttcgacaccttcgcttgggtactcaagataacgcatttctttcctgcgcttgcttcgactttctacccatgctctattagttcgacaacccgaacaaaagaaaataatactttgaatggtctccgaggtgagataggcttgagcttgcatcattattgagctgggcagctaatcccccgcagagctttgagcaataaatcaatcgcgactcgcttgtcatgtcgggctacgcaggcggaggccagtacgacgatggctatgcccacgggcaggcacatggtcaagctcatggggatgctcatggtgactcgtactaccaggacgaacatgcacagggttattatgacaaccaagggtatggcgatggctactacgatcaagggtataaccacccccacatcagaaaatggagtcatgggctgacaagactagtaatggctactacggagcagacggtgttcacgccgacggagctcctggggatcatgcagctcacgcggatgcaggccacggatacgccgacggcggatactacgaggctgggcatatagatccccacgccgcagaaccgtactacgaccagggacaaggggaaccccgaggccgtcgtggtcatgattccgaggaggattccgagaccttcagcgatttcaccatgaggtccgagactgctcgggctgcggacatggactactatggccgtggagacgagcggtacaacagctactcagacagccagtacggcggtgctggtggataccgtcctccttcctctcaagtttcctacggtgccaaccgatcatctggcgcttcaactcctgtctacggaatggattacggcaacgccattcccgccggccagcgctcgcgtgagccttacccggcctggacttcggaggcccagatccctctctcaaaggaggagctcgaggatatcttcttggatctggtcaataagtttggattccagcgagacagcatgcgcaacatgtatgaccacatgatgactattctggactctcgtgcctcgcgtatgacccccaaccaggcacttctctccgttcacgccgactacatcggcggccagaacgctaattatcgccgatggtactttgccgcccatctcgatctcgatgatgcggtcggtttcgccaacatgaagctcggcaaggcagaccgcaagacgcggaaggctcgcagggctgcagccaaggccgccaaagctaaccccgaggacgaagaggaaacgctcgaggctttggaaggagacaacagcttggaagctgcggaataccgctggaagtctcgcatgaaccggatgtcccagcacgaccgggcccgccaagttgccctctatcttctgatctggggtgaagccaaccaggtgcgattcctgccggagtgtatctgtttcatcttcaagtgtgccgacgattactacacttcgcccgaatgccaggcgcgcgttgaaccggtggaggaattcacctacctcaatgagatcatcactcctctctaccattactgtcgagaccagggatatgaaatcatggacggcaagtatgttcgtcgtgagctcgatcacaacaacatcattggttacgatgacatgaaccaactgttctggtacccggagggtatcgagcgcatcgggtttgaggataagacccgcctggtcgatattcctatctctgaaagatggcccaagttgaaggatgtggtctggaagaatgccttcttcaagactttcaaggaaactcgctcctggttccacatgatcacgaacttcaaccgtatctgggttatccacctgggtgccttctggttcttcactgcctacaacgctccaactctgtataccatcaactaccaacaacaggtggacaacaagccaccgacggctaaatacctcggcgctgtcggtttcggtggtgctcttgtctccttcattcagattctagctaccatttgtgaatggatgtacgttccccgacggtgggctggagcgcagcacctgcacaaacggttcatgttcctcattgtcatgttcattatcaacctggctcctggaatcgtcatcttcgccatcttgcccatgctgaaaatgtcaaccaagacagaaaacggcatcggcctcgccatcggtattgtccactttgttatcgcagtcctgacagccactttcttcgcaatccagcccttgggtgcgcttttcggcaattacatgaagaaaggtggacgccaatacgttgccagtcagaccttcacggctagtttctatcgtctttcaggtaacgacatgtggatgtcatacggcctctgggtctgtgtgttcggtgccaagttggcggaatcctacttcttcttgacgctatctttcaaggatcccatccgcatcttgtccccaatgcagatccaccagtgtactggcgcgcaatacattggcaacaccctttgccaccgacagcctcagattcttctgggcttgatggctttcatggacttgacacttttcttcctggatagttacttgtggtacattatttgcaacacaatcttctctgtggcgcgatcattctatttgggtgtgtcaatttggtcaccgtggagaaacatcttctcccgcctgccgaagcgtatctactccaaggtgcttgccactaccgacatggagatcaaatacaagcccaaggtcttgatctcgcaagtttggaatgcgattatcatctccatgtaccgtgagcatcttctcgccatcgaccatgtgcagaagctgctttaccaccaggttccctccgagcaggaaggaaagcgcaccctccgcgccccaaccttcttcgtgtcacaggaagatcaatctttcaagactgagttcttcccacagggtagtgaggccgagcgtcgtatttcgttcttcgcccaatcgctcgctacacccatgcccgagcctcttcccgttgacaacatgcccactttcacggtcatgattccccactacagtgaaaagatccttttgtcgctccgcgagattatccgtgaagatgagccttactcgcgtgtcactttgctggaatacctcaagcaattgcaccctcacgagtgggattgcttcgtcaaggataccaagatcctcgccgatgagacttcgcagttcaacggtgataatgagaagcccgagaaagacgctgccaagagcaaggttgatgacctgcctttctactgcattggtttcaagtccgccgctcccgaatataccctccgcaccagaatctgggcttccctccgatcccagaccttgtacaggactatttctggcttcatgaattacagccgtgctatcaagctgctttaccgtgtcgaaaacccggaggttgtccaaatgtttggtggtaactcggagaaactcgagcgcgagctcgagcgcatggctcgccgcaagttccgtatctgtgtctccatgcagcgttacgccaagttcagcaaggacgaacgtgaaaacaccgaattcttgctccgcgcttaccccgacctgcagattgcatacttggatgaggagccacctctcaatgaaggcgacgagccccgtatctactcggctttgatcgatggtcactgtgaaattctcgagaacaacttgcggaagcccaagttcagaattcagctttctggaaaccccattctcggtgacggaaagtccgacaaccagaaccattgcatcatcttctaccgtggtgaatacatccagcttattgacgccaatcaagacaactacttggaagaatgtttgaagattcgcagtgtcctggccgagttcgaggaactgaccactgataatgtttctccatacacccctggaattgcctcgcctgacgagaaccccgttgccattttgggagcccgtgaatacattttctccgagagcgtcggtgttctcggtgatgttgccgcctccaaggaacaaacgttcggtactcttttcgctcgtacactggctcaaatcggtggtaagcttcactatggtcatcctgatttcttgaatgccactttcatgacgactcgtggtggtgtctccaaagcccagaaaggattgcacttgaacgaggatatttacgctggtatgactgctgttctccgaggaggtcgcatcaagcattgtgaatattatcagtgtggtaagggtcgtgatcttggtttcggatccgttctcaacttcaccacgaagattggtactggtatgggtgaacagatgctttcccgagagtactactatctcggtacccagctgcccctcgatcgcttcctctcattctactatgctcaccctggtttccatctgaacaacatgttcattatgttgtctgtgcaaatgttcatgtttgtcctgatcaaccttggcgccctgaagcacgagaccatcatgtgccgttacaactccgacctgcctattaccgatcctcttgtgcctactctctgcgccaacctgattccaatcctcaactgggtgaaccgctgtgttatctccattttcattgtgttcttcatctcatgggttcctcttgcagtccaagagctgacggagagaggagtgtggcgcatggctactcgtctgggcaagcatttcggttcgttctcgttcatgttcgaggtgttcgtttgtcagatctacgccaacgccgtgcacgccaacttgtctttcggtggtgcgcgatacattggtaccggtcgtggtttcgcaacggctcgtatcccattcggtgtcctctactcacgattcgctgggccttcaatttacctgggcgctcgcctcctgctgatgctgttgttcagtaccacaacggtctggactcccgctctgatctggttctgggtttccctactcgcgctgagcatttcgcctttcctgttcaacccccaccagtttgcctggaccgacttcttcatcgactaccgcgactacatccgctggctttctcgcggtaactcccgatcccatgcttcctcttggatcggtttctgtcgcctttcgcgtactcgtatcactggttacaagcggaaagtgcttggtgttccatcggagaaaggctccggtgatattcctagggcgcgaatcaccaacattttcttcgccgaaattgttacgcctctgcttggtgttctggcaacaggaatcccgtacctatacatcaactcgcggacaatgtattctgatgatcccaagtgggctgcgaatcccatcattcgccttgcgattattgcttttgcccccgtcggtatcaatgccggcgtcgcgggtatgttcttcggcatggcttgctgtatgggcccattgtttggcatgtgctgcaagaagttcggtgctgtccttgctgctattgcccatgccatcgctgtgattatcttcctcatcatcttcctggccatgttcttcctggaatccctcagctggccccgaaccatctctggcatgatcgctgctatggctctccagcgcttcctctacaaggtgatcattgccctcgctctgacccgtgaattcaagaacgatcaatccaatattgcatggtggaccggaaaatggtacggcatgggttggcactccctttctcagcctggacgtgagttcctgtgcaaaatcactgaacttggttatttcgccaacgatttcttccttggccatgttctcctgtttgccatgctcccggccctcgccattccctatgtcgacaccttccattcggtcatcctgttttggctgcgcccaaggtatgtagctcctcatctccacactacgaaaactctgtactaacgaagcatgcttctagctctcaaattcgccctcctatctactctctcaagcagtccaagcttcgcaagagacgcgttgttcgcttcgccattctctacttcttcacgctcttcatcttcctcattattatcattgcgcctattgtgctgcgaaatacgaagcaattggatagcatcttgtccggcggcatctgggacagcctgggtgtctctaagccgtcttcgattggtcttctgcaaccacttgatcacggactcaatgacaccgtctcctggtacactggctctaatatccccaagggctacacctcaggcagcatcccagccgcctccgagggcaccggaaagtggtccatctaatcgccttggcgaaacgacatggaaatgccttgtacaaagttatgcgtttactaaaattcgctgcatttttctgaactcaccggcgcacaatttgatattaatgaatggttgcttccaaatattgtttgtggaatgacgcttgtatgaaggggtcttccaagtcatcctcgggggtttaccttcgtttcaccagctttctttgcttgttttattttacacttctaccggaattaaattgcattgctttcaagaaaatattcttcatgttcgtaatccctaatttcacagtagaatgtccaaagaatatgcaatgcacgggtcaatagatgggtcacgtgtaccgaggttcccaacactccgagtctcccgtttcatcttccctccgttctccacgatcaagcaccactctttcgcgtctcttcttaacctatcatctctcaggtatctcgctggcctggcgtaccgcataaaccgcgctctcttcaaccctccgccatggatctccaggagacccagcgtatcctttccgaatatctgcacgaactcgcagatctattccaccgtgtgcctggctccgcaatcttcctccgctacgtgaaatccagctatcaagatgacccaattcgttctgccgtcgaacttttcctcttcctctttgccgtgcgataccttctagcgcccaagtattcgaccaaaccgggcgtggtaccactgacggaagacgagattgacgacctcgtggacgaatggaccccggagcccctggtcggggacccgacggccctggaagcgatggaagttgataagcggaccgtgattgttgggtatcgtaccccctattgcttctgcctgacgatactccgcggatattttactgacaagtggaatccggctctgtagccctgtaggcccgaaatcgaaactcaccaacggccgcactgtgatgaaccttggttccttcaatttctacaacttcaatacgaatgagtcgctcaaggaacaggctatccagacactccgtgcttatggtgtgggtccatgcggaccgcgtggtttctacggcactcaggatgttcacataaagactgaggatgatgtcgcgtcgttcttggggaccgcggcttgcattatctactcccaggccttctctaccatttctagtgttattccggccttctcgaagcgtggtgacattatcgtcgcggataaaggggttagctttgctattcgaaagggtattcagatctctcgaagcatggtccgatggtatgaacataatgacatggaggatttggagcgcgtgctcgcgaaggtcactaaggagcaggcccggaagcccctgactcgccgattcattatcaccgagggtttgtttgagtcttatggcgacatggcggacttgcccaagatcgtatgtgaacccgttacatgagattatgaattggaatgctgacaactgttgcagatcgaactacgactcaagtacaagttccgtttgattctcgatgaaacctggtcctttggtgttttgggacgcactggccgtggtatcacggagcaccagaacgtcgatgctgccgaggttgatatgattgtggggtccctggccggtccccttgttgctggtggtggcttctgtgctggttcagaggagattgttcaccaccagcgtatttcggctgctgcttataccttctctgctgcgcttcccgctcttctttcgactaccgccagtgccactatcaacatcctccagaacaaccctgagacagtgtcacaacttcgtgaacacaccaaggctatgcgggctcaattggatccccgaagcgactgggtttactgcactagcgcgcctgaaaatcctatcttggttttggtcatcaagccggaggttgtggctgctaagcgtctcacagaagatgaccagcagttcttgcttcaagatgttgtcgatgaggtatgtctacatgttttttcattttaactgaagtccatttctaatatccgcagtgtctggccaacggcgttctgattacgcggctcaagaccctcgaggacaacttccagcctaagcaggttatcccgcccgccctgaaggtgtgcgtcactaccggtctcaccaagaaagagaccgaaaaggcaggaacgattattcgacatgccattaccaaggtgatgagcaagaggaagtaatgccctcccccgccgcttagctctggtcctgaccagccattcgatgactgcccacgcctatatgacggactccatcaatttaccattctcctcagtcgacctacgccctaatgccttgtattgttactttgtcgatatacattcttattgcatcccctgcacaggcccaccattttctctttttgttggcggttgatcctatacctgtgcatggttctaagttgtttaatactacccttctgcccttggctgtttgcttcaaggatgtctattttgtatacattattcagatcaaaaccctcttcgtcccatgaatggacgctattgctatatctttcgattctttgcttcaattgttctttgctatagtagtatacactggacctcagcagcaggccagcagcctcatatctccaggccagactccaaccatataaatgccccttcctccgccacccccttccaatgtctctcaataatatcagataacatctcgctagcattctacttcacatttaccgaattcctcaatgtgtccaagcggacacccgagaatgggccccacattccatctcctccatcattgggagcattcatggttcatcgccgacttcgagatcttgtacgatggccccgcacgcaagatctcctcgtcgagcgaatcagacgccgaaggatttctcaaccaagccaaggggcatgtttgagacctggaagctccctgattccattccctagatctaagcgctatgcttggctatccttgtgtttacaatctctaccaattgagtccacgtaggtcgatctgtgctccagcccgccagcatggttataatggatcggatcggcaacatatgtgtgggtttccagaaggttgcaaagttactcatgttatagacgtcgactaagttcagctaacttcactcgagtgtgttgagatcagtctcccccgggagaacctggctgcaaaatgaagcgccttactcagtcacttgttggcctgctacttgcctgtggtgtttgcgccgaagctgggggtaagaacgatattatccatgcttgtaaaggattttgctgatagcgatagccgacaaacaaccccgtgcaaatctcgctcaaccagcctataccaaagaggtagtcgtctgggtcaatgagaagggagaaaccatcagcacggaaacacactacgtccaggccttgacctctgcgctccaagagaatgttagtagatagaactgttcccgaagaagagaagagatgttggttcctcatcaaaagccagccctaactctctcatcaaagcaaccctcaatatcaaccccggatacaaatggtgcaccaccacacgccctatctaagaacagcaacgaccaccccgtcccagccaagggcaaacccaagaatctaccacaccacccacacaagcaccccaaaccagccgtctcccattcccaccaaaaccaacacccaaacgccaacttcggcatatcctactccccctacaaagcagaccgcacctgcaagaaccaagaagaagtaaaccaagacttagaccgaatctcctcatactccttcatccgcatctacggaacagactgcgaccaaaccaaaaccgtaacgaccgccgcccgccgccacaacatgcaagtcttcgccggcatctacgacctaaccaacttcccctccagtctagacgccttcagcgaagcaataacagatccaaacggcaaaaaagactggtcaatcttccacacaatcgccgtaggcaacgagctcgtaaacggcggcaccaactccgccaccgacgtcgcagccgccgtacaaaccgcccgctccatcctccgcgcacaggggtacaccgggcccgtcgtcacagtcgacactttctccgtgcacctcgaccacccggaactctgccacgtgtccgactactgcgcggcgaactgccatgctttcttcgacgccacgcagcagcctgctggcgcgggtgcttatgcgctcgagcaggcgcgcagtatctcggctggggctggggggaagcgtactatgattacggagtctgggtggccgcatgctggggatgcgaatgggggcgcggttccatcgaaagagaatcagttggcggcggttgagagtttgaggaggagttttgagaagaggaggggggatttggtgctctttacggcttttgatgatttgtggaaggatgataatatgtatacttttaatgcggagaagttttggggcattcatggagggttgtagagctggtggaggttttcttttctgttgctcagttaagttggcttttgctctttctttggctggatgcatgcaattgttcgtgtacatagatcactctggaattatcggatagtcgaatgaagaacgaggtattaacaaagtttgatatggttcgctgatgatactacttgtacatgatattgcagactatacattagaagcaatccgttcaggaacaaacagagcttagctgcggaacgtcagagcagcctcgcgttgcttcgcctcttcctccgaacgcgcctcgatctgatccatccagccatccttacgggtaagctcatcgaaagcctccttgttcgacggaatatcccagaagaaatctttctcgctcggggatgtccgatgagcctccacgtcccgggcatggcgaataataagtgcagtcagcatgccgcgggacttgctactcgggttgatgcccagctggttcatctcccgcaggatcgatgttacagcgggaagatccttgcatacgcgccagtggtagtggatcaactcatcgtacaatccagaggaagcaccgaggaaagtagacacacggccgtactctttgatcgtcgagcggaattgagggatgagtggggattcgcggaagtgcgtgttcagcacgcggaaggcgatcaggagggtcttcgggtatagagctactacgacgggggcgactgggacaacggctgggacgcggaggggtcctgatggccgggtgggtggttcgggctggtctgctgtgctcacactctccgggtctgaagcctccacgagagatttctcgtccaggtggcgcagcatggagaagatgcgctctttgcagacctcccacacgcccagatcgcccttgccttcctcgatagcttggaaaagtgcgaattcgatatgctcggattctgcttgcacgacgatctctatcgcccgccgcaggctgacggttacttcggcggcggtggctgtggcgggctcggtatagcccagatcgcggagcttgattcgctttggaccttggttctctgctgggacttgttcttccgtttctgacttctctggtcgtcggtaagaggagtagtcgtccttcgcctgctgcttggctttcgtatctgccctctttcgtcttgggtcttttagcagattgtcaaacaccgacatgagctctgccatttcggctttcttctcctcgctcattggtgtcgatgagctcgcctcggtagtttccccatcgtgtttgaatccaagctgctctaagagtcctccgaatatcaatttctcctggctggtgatcttcggtgctatcttcgttgtcttcttcacgacagacggtctgaggctaggcctttcagatacagatgctgcgcgtttctgcagatagcttcgtcgcggtttcggagctgcctcggtctttgagctgttggtaattggttgttcagaagcattctgacttgtgttatcctccgctaatgatttgttttctgttgcatcattggcctcggcattgttctgggtagaaaaagagcgcggaaaacgacgattgaattggttccgagccgcggatgagagtggtgtaagtgtgcgtgtttgatataggaaaggtgccgtggaattgcttcttgagagaaggcatagccggttgatatttgtcgccatagctgcgtccttaattgcgcagccttgttcttgcacttcttagagtaaatccaacctggagtaactcttacttcttctctttcacctttcaactttgcaacttcactctaaaaaaagaaaaacaaaagatcactttttctttaaagagcacggactccggtgatcaacttccctcaaagtcacgtgatgtcgtgtaactggcccacgcgtttccaagacgtgcctcgcaccccagaggcgcaaaccgcacgcgaacccggtacgcctgagattcccgaaacgaacatgtcggggaaaactgagttgtcagacttcgaacagcagcgcttagcaaatattgccgagcgcgacgcgctgttgaagaaactcactctcgaatcgcaatcctcgggactcttcgcaagccctaagaatccccgcagcaatggcgtgaaaccgaaaaagcgcgcagctcctaaagtgaagactgaggaagttatcacaccgcggcgtacgtcctcacgccttaagggcattgcggccgaaagtgaagtagcaaagcgcaaggccgacgacgaatatgaggcgatgcgcgaagcagatagactcaagaggatgcgccggacagactcattcagtcaggcagatatgtttatttctgggcagaagcttagtcctgatagcctgatcggcgtggatgttatcaccaagggtgttgcgaagccctatgagaggaccttcgggaaagatgaaattgagaagacgacggacaaagacctgaaggctcttcggaaggagatgaatgggttgaaattgtgggagtcttgggatcctcaacgtaatcactatactctccacccacaagctaccattctgacacattttcgatcattacagggatcaagatcaccccggagcgtgtgtatagcatggtctttcacccatccgaatccaaacctcttatattcgcgggtgacaaactgggtcatctgggcatgttggatgcttcgcaggaaaagcctaccccgggtgaagacgacgacgaggatgactttgatccagatccagtcctaaccacattgaagccacatactcggaccattagcgcaatgatggtcaacccctcaaagccgacacatctgtatacggcaagttacgacagctcgattcgatcactggacttggagaaaatggtctcttcagagacctatgctcccgaatctactactattgacgaggcactctccggagtagacatggcccccaatgaccctaacacattgtactggactacactccagggtggattcgggcgatacgatacgcgaacgccgcggaaagataccaatgtgtcaaactgggaactctctgagaagaagatcgggggcttcacactgtgtcccacccagcccaactacttcgccacggccagtctagatcgattcctgagactgtgggatctgcgcaagctgtcgccggaggatcccactcctgttgccgaggatgaaagccggctgtctgtttcccacgcagccttcaattctgctgggcagattgccacctcgtcctacgacgacacattgaagatatacgatgtgggcgcgaagggtctcttttcgtggaagcagggccacacactttcagcaaaggagtttaagccagacacagttgtccgccacaactgccagactggccgctgggttactatgtatgcttatccctctctttcctttttcgcatcccttttcgttctgccaagtatcattacctaactttgttcttctagtctccgccctcaatggcaactgaacccgcaatcttccatccagcgcttctgtatcggcaacatgaaccgttttgtcgatgtgtacagcagcaatggggatcagcttgcacagcttggtggagatgggatcacggctgttcctgccgtggctgtattccaccgtagcaagaactgggttgctggtggcaccgctagtggcaagctctgcttgtggaagtgatatgaatcttcgctcatcttctttatgcagtgtgaggctgtataggttatttgctaattattttactgtgttttgagcttcctttgaagattcggtgttgtaggaggcgtgttgcctaggattttgtttatcccctgctgtgttgttatgacgacagacttgctattgttttccaatgtacagagaccttgatctgttatttctatctaataacagtcacaagcttacaaaaatgagaacaccaagccattccatctattggaaaaacataaaaatagtaataggtatttacacgatggccaccatctccagaggaatccgaacacacaagaaaaagacccagatgattcctcagaacgaccaaaaagagaaaaacacaagagcctcagccgagttcaaaatcagatcgtgttctttttagctctctttgtttttatcttagagctagactggaggagacgtgtataagggagggcgggaccatgaaacacacaatcaaaagaaggaatgggtatcaacaccatgacacatgctttaggggagaacatagacatatagatgatcaggcagaacggaactcgaggcaaaagatggggataaaagaggaacgttggaatcatgagcaatcataagcacatgggaaagagataggcgagaaagaacaaagtcaaaaacacgtaagaatgaaaggagattgcatgggcaggcattggtgcattaagattcattgcgtagatcctcgtgcgagtggttgttttgattctggtcacgttccttagccttgcgtcgggagggagcaggaacaaagtcgaagaagcggtacttgctcgaggaggaggactctttcgtgacgctggccctgcgtgccttggcagtatcagagtactcgagagagtaggtcgaggagttcttcgagcttccggtactgtcacgtgggtcagaccagcgtgggatggcaaatggaatgcggctttgatcccaggtcgccgatgacgagcttggaggagtgtcatcctcgggatcgggaacctggtcagtggagtggcgagctggaggacgcgtagggaagtagccagtcgaattgcgatggctgcttggggcggtaccaactgccgtttctggcgctggagtgccgggtttgcttaagctctcgtcgtagaaggtaacaggtcgctccatcgaatcgaccagtgcttcccatttgatctcaaggtttccactcggccgttctgcttgctcggctcgtttgagacattcctcggtgcgtgcccgcaggcgaagggcttctttttggaacttggcaaggctgacgtccagctcggtcaattcgttgagtcgttccggggagacatcaagccagactcgtatcaagttcgcaaaggagcgggcatggtcaatgagaaatggaaggctagggaatccctcacgcgatgtggggggcaaccgcccaaggatttggataggggtggtgtaggagggtgtgacgatggggactggtcgatcggcgggaatcgcacaaaccgaatcaataaagtctttgaattccgtgcgatgaccaacgaggaatttgttcatcggttccatccaaggttctttattgccgaatgttgtcatattggccagaccttgcaaagctttggcaatgagggtcaaagtgcgctgtgcacgaggacgagggtgatctggagatgattagcaaaaggacaagtcaaggtacgagcgtagttccatacctttcaaaagcccgaacaatttcgggttcagaatagccgggcagaagaagcgtaggaagaggaaaccagaaacactactgtacgtcacggaccggaggaagtcaccataacgatcgtctgcacacgccctgacatgccggaagatgcgtcgcagttctgggggacacctcgacgcagatcccgcaatggatttccacacgcttgtggtgagagctgtaaggtttcgccagttgcgttcaagatcctcctggcgtggaattcgagacggatcaacttcgcattccggatcgctctcatcaatatcgcgtagtcgttccgcgacagtctcctccaagtactgtttgcccaaacgacgcatgtgaagatcgagggccttagttagaagcgagtttccacggaacaagaggttagcctccacagtggccgtccttcccatgtctctgacaaggacctcgcgctcttgactagtctcctgtgggttggtcgaatgaatcctcgttgtatacctcagccggttggtggtggattctttgtgaaccccatcgatttcatcttcaaccaaggctgagatccattccaccgttgaccctgagacctgataaatgttcagaagcatctcggccaggtgatttagctccgatgacatcagttgtgccatgttgattgtcaggccattagtgaaggagtggagaagttccgacattgccgagtactcatcggacatcaagacgacagtttcctccatccgtgctctcatgaacatctcgccaattgcctgatcttgattatccaggataggccaccacttttctatatccacgccggcatccaattcttcgagtcgcaggtctacccgtccgaagacaatatcatttgcggaaatttcaatttcatccagcatgttcaccgcattcacgtcttggttgggtgcgtatgttccatgcgcgataagtgtccagtccctctgtgtcgggttgagggttttaacgaggatagaggcttgggatagtactggcggtagatcagtgaagataaaatcttctcgccagaaaggattcatggtgcgatacttgacagcagtcttgccacgaatttccccatcgaggagcacctccgtgtaatagtcgctgaccttcgagcttggaacaggctgaccatgtgatcttgatgcctttcggcttcggggagtgtcctcctctatggggcgaaacagcttcgcctccacaattttcaagctcaagaatctttcaatccggaacatgtcttttgtcactgctacttcgtttgcctcgctttctggttttcgatcccctcccttagacaccggaccatagagctctgggattgtaaatgcacggagaagtacaaaccaaacctcaaagagaacacggttttcgagagcgaggtatataggccgcacgttggaatcggataccgggtgtgctgtatattgaggatagatggcaatgcaaaactcatcatccaacaccgatgagttcagctgctgaatagcacagcgtgataactgggacaactgcacatatgctaagagagcgacgtcggactctgtgtagagcttgaaaaagccgttttcttgtagtgtgcagctcaccttctgccacgaggaagaaagagcccttgattgtcggtacgtagatacgcgacgtccggacgacggcattgcaccggcagcagacggtttgtcccatagaagcatcttaccaactttgatgatagttgcatccttttgtgatgcggtttccgagttgcgtcgacgttcggggatccgtcggtctccaatcacaacctcttgaggctttgtcatcttgttctgaacgcccttgggccgaattggttgccaacaaagtagagctgcaagccaagaatcgaaggtttcgttcacgtgcggtcgtagttgtatcccaagccccgaggtaaatgtgtgaacgctcagataggtgcactggagctcagggtcccacaatgtccgaactcgacaaccacgtagatcaggaattaatgttttggccaatgccggctctcccttggcttggtaaatgagacttccagtcgcgacgttgatagcgcagtatccggatgtccaggcagtggtcgaggctgttcgaaaagatagaatgccatgcattctaccgcaggtggtcttcatcagctgcaggatcttggtgccttccgcactcgagaggggcgcgccaaatgaatcttgattttgtgctccaccggcgaccagacctgcaactttgctcagtcgatggcgagggacggtctggctgttgtattttggggactcaattgacggaaaaccgatggaagaagatggatcgtcgggcactttcgattgagagggactggccgtgttaattgacccaacgcgagttcgagttttgttggggttgacgtcgctgtgctcgtcagccgctgttgtccttgatcgcgcccgttaactccttgcttccagcggagaatcttcttcgcctgctgcagatgaatgtttgttgaaatcccgacgacgttctggttcgacgggccgtgatcgcacggtgtttcgagctgaagacaaagcgccgcccgtgaggtgctccggttcggatgagggggaattgttgacagagggttgtgactctggcgtcacagttcgaatggtagtttctcggaaactgtcgggatagaccataccatgccggtccctagatgaagacttcttgctagcacgccgttccactggacgactgtataacgcttggtgcatcgagcttcgcttgtacgcgttcggattctcgggctccatctcgttctgttataggacagccccttcgacaggcgatagagacaaaccgaaaatgaaacccgtcaatatgttaaaagaggagagacggacaggttcactcccttgtcgcacccaacacaacctccctcaaaacaatcggtgaaagaagagcttgttggcaactgacgtatgcggcacggctgcgcttgtataattgaggatcgcttttgcccaggagattgttatgagacaacatggagtccggtgagaggttgggtattggggtcgcacattcggtcgaggcgccgggagaggggaagtagtaatgggaggctaggacaaaggaggcgcgggtcaccgtcgtttgtctgagagatgcaggagaatctaacgaatgcgctaagcgtccaatggtccggccagtcgatagcgagggtgtcgctgtcagtgttagtggtctgaagaagcggcccgatagaaattggtagttgagaagggcgtgaagtgatatcattattagagggaggggagggggtatggggtagggtatatgggagtaaagacatgcgcacataccttcatcagtcccttttgaaattgggaaggttttgcttatgctctttaggagaggtgtgcgtgtgtgcgcatagaggtgtttttgcggattccagcagatgtaggccgctttgggacgggggcagaatgagggggaaggtcttcaaaggaaaatatttcccattaatgaagaatcaagttgaaattgcaatgggaagatccggtaaagatcgccaaaagccagagagagagaaagagagggagagggagaggggaggggggaggggaggagagaaagaagtggatagcggagctgaatctgtatatgggaaaaataacgaaataatgaggaatggcaacgctttctgacccttttgcctctatcttagtctctagagcttgctgcaagtctattattggctatatccgtcaatttatacttccccccatgttttaggctacctggatgacagcgcaacgtggatgggcacgttctatatacatcctaatcatccccagagcaagtgagcttggactatttacctcgatactccgtagatgtagatccaacccccagcctttcagcttcagtttaagcctttaaccgaagataccgagtctatattgtaatatcaccggagcaagggaagaagtaaatagcgggttgaggtgaagatcaatagctttcggatttttcgaaaatggtcctaaactgccgagagattttctagaagtcgggataactgcatggcgtctttctgctgactcgcactggctgcggatcaccgggctagtggaaatgggccctgaagtcttgagtcatgacggtcatgcttgagatattgatccctttgtggccgtgcatcgtactagtatattatattataaatgcatggattcatatgctcctgacgatggcaaccttctccttgtatttggattaactctatatgattctaaatgaatgtttctatacggtctgctctgcaatatgcaaattcaaacgtggtgtccggggcgcagatcctggccccaactatggtacatatgcacctaggctaacaccttgacgcagtaggtacttttgattcgctctagttacttatacactaatagagacattaataatgtcgtagccggggaggggagtctctactaaaacaggttgagggaaatctccgaaagtggagtcaattgttagtctgtagcggttaggaaatgagatcttcagccaggattatatactggagtcacacagaactaagttcagattgagccgtagagagatgataaatatgagcatgtaagcatataagcatatctgattttgaagtattcaacacaaaaaatagcaagtcgcaatttcaaagtgcttcttactcagtacggtacggtacccgctcataaccatcgtagatgagtgtattgtggaactgtggatcaatcctaaattgttgtactttaccagtgggttctggaagtcttccatgcacgcatttaataacgtcggccagggaagcgattggacgacggggcactgcggattcgagacgactcaagaatgccggagacaagcgtaggcagtaagatggacttttaccgacggtactcatagcttggcatgccgcagctagtgagtactagtactagtactatatggtggacggaaacaggccgcatagcgtcctgttctagcagagctgtggggtgaatgtcgtaggaccgatagaggttcggagcgtgaattcattgtggagtccctccgatgttcgggaagatttattcaggtatgctccgggacaatcttgtacgaggcttgaatatctgctccgctcgagatagttgtagaccctctaagctagtgaggttgcagcaggattcgaaatcaataagataattttccgtcaggagttatgcaaagaaatccattctagcccaaatctatggagctggcgattgaataattatagagtcaatgagtgagaagaatatggaggtagaatatggataggttagtactgatggaggcaaagtaaattccggtatccatatcacctgtggagataagataaggtccacaagggcccaatcacgtgatacacacacatgactttagattgctgcctgaggccatataccccttctttatgtcatcatagctatcgggaggtctggggaatgatcatggctcctggtgactgttatcacgaggactaaatcaaaggctactattttataagctggtacagtcaccttaattagggtgcatgctcatttgaaacacgattacgttcagtctgttgtattgatagtgatccccatttatccgcatttcaagcgccgctggatggcatttcattaccacgatcactggcttctgaagctgttgccatgaatggtctgactatagccttagtctgattcaaaatgatgtcctctaacatattatcacggttcctacctccaacgggctcacgatcggtctatgagaccattcgccaacatgacgtcgggtccgaatactctgatctcgaagaacgtgcgggcttggtcatagaagaccaacaggaacaatttagtgaccgggaactggaggatgcactagcggatgcacaggatagtgaaataatcagccccagcactgcattgcttgggcaggcacggtcgggcaaagcacctgaagagcgagcttctccatctggcacccgccgtcgcaagtcgtcccggcctcggtggatgccacaagaatcaccactcggatatgagctcgatgatcatgatgaggacgtccctcagtctctgctggtggaaggtcatcacgaagatctgaaatcacagttacctcctcctccccgacttcatggtcgtccggaccgacgaagaacccctagccctggtccatcctcacaacacaccggaacacgttggaatgaacaagcagcccatcaaacactgcccagtgaaagcggtcatccaatagggagatggttcaccggccaacaccctggtcttgccaatgttgaccccaagaagaaggcaatgtggcggtgggcgaacgtcgaggatctggataacttcttaaaggacgtctacatatacttcttagggaacggaatttggtctattctgctgactcgggtgctgaacctcttgtaagttcacgatgaaaccctttccaaagcatcctaggagaagctgacagtacacacaggacatttgcattcgttgttggtttctctacattcttaaccaactgcattgattattctaaggttcggcgaagtaaaactctggatgacatcctcgtgcctcaatgtacagcaaatatgtccgggtcgtccacatttttgctgtggctttttagcttcttctggattgggaagcttttccagtacctactagacattcgcaggctcaaacacctgcatgacttctatttctaccttctcggcgtctcggatgccgaggtgcagacgatttcatggcaagaagtggtcagtcgactgatggcgttgagagattcgaatccatctactgcggctgcggtttctgccaaacatcgaagattcctgggcagccagtcaaagcagagaatggacgctcacgacattgccaaccgcctaatgcgcaaggagaactacatgatcgcattagtgaacaaggatattctggaccttactctccctatcccgttcctcaaaaatcgacaactcttctcccgaaccatggaatggaatctcaatctttgtgtcatggactatgtctttaatgagcaaggccaactgcgaaccctgttcctcaaggacacgcatcggagagccctgagtgatggcttacgtcggcgctttattttcgctggcgtcatgaatattttcgtagcgccctttattgtggtctattttatgatgcactacttcttccggtacttcaatgagttcaagaagaatccgggccaaatcggttcccgtcaatatacacctatggcggagtggaaattccgcgagttcaatgagctttggcatctctttgagcgtcgaatcaatatgtcttatccattcgctagtcgctatgtggaccaatttcccaaggataagactattcaagtggcacggttcgttgctttcatctctggcgctcttgcctcggtgttggcccttgcctcggtgatagacccggagctcttccttggatttgaaattactcctgaccggactgtgctattctatcttggtattttcggtacagtctgggcctttgcgcgagggctggcacccgaagagaccgatgtcttcgaccccgagtatgcacttctcgagctgatcgattttactcattacttcccgtccggatggaaggggcgtttgcatagcgacgacgtgcggaaagaatttgcaatcctctatcaaatgaaagttgtgatattcttagaggagatcttgagcatgattttcactcctttcgtcctatggttcagcttgcccaagtgcagtgaccgcctcattgacttcttccgggagttcaccgtgcacgtcgacggggtaggctatctctgctcttttgccgtattcgacttcaagaagggcacaaatgtgctttcccaagccgggcccgggcgtcgagaccctggcaaacaggacctgcgcactgattacttctcaactaaagatggcaagatgctagcttcctactatggcttcttggacaactacggtaccactcatcaacctaacagccgacgacaattccacccaccgccaaccttgccaaccctcaactcacccactgcagccgagttcggtgctcttcctgatcgccctgaccatctccatgcacgcactgggccgaccgccggtgtgccatttggcgctcaatcaatgatgggagactctaaactaaggcaaatgggaggattcgatcaccgatctcctgctccatccatcctgcttgacccgcaccaccaaccctcaaccactgggttccgcgccgcccgaaccagcccccagcagcaccatcgctcccggctcggacacccgtctacggatactatcgacgacgaagaagaaccattatcccaagacggtcgtgaatcaacaatacggcagtcgggtgctcgtaccggtaattccagtgcaggtgcaggcactagtgacggtaacctcggcggttcttggcgcatgaacccactcagcaaggacgaggatgatcctgatgagggcgatgaaggtgaaaatatcgacgccattgctggtgggggcggtgttttggggttgattcagcagttccagaaagttaataccgaaggcagacggacggggatttagatattcatctcctgtgccacttcttggtggtaggcttacttagaaagctcgttgcttatatgcttcagacacgatatatgaccatttcatgcagcgtttagtctttcattgctctatcatccatttgcctgtcatgatgtcagcagtatgtttgtctactaactagtcctaagtcacatgcacccatgaacatcaggcaccttaggaatctgtgtaagcgcccaaataccgatacacctctgtgcccctcctttccctccgccatccctccatccctccatcgctcttgatgtgccttcctctttgaccttgcccaccgacaaaccacattcatatccacagaaacaacctagcatcaacaagatgctcgactgtatcggaggctgtatctttgggagactggcgaacgagccacgtcctcccaccgacccccgatcccctgagcccattgcctctgccattgtcaccacaatactcaatgccgacgaaccatactcgctcgacaaacaactgaacgaggaactttccaccgaaagttggaccgacgtcatagcacaagctatcctccacggtctagagaatgcaatcaattccggcgcagacatggcgaaagccgcctctgatgctgcggcccagagcagaaacgctgctgtcggctttgcgacagaccatcctatgtacactacgctgattgcattgggcattctggccttgttgacaccttgggctcttgaaatccttgggtttggggagttgggtccaattgagggctcgtttgcagctgggtggcagagatcatttgctggatatgtgcctaagaatgctttgtttggctatttccagaagctgggtatgaaatggcgttggatttagatctgtctgagtatggtcctcctgatggaagttgagttcacttcgtattggcggctggaagttcgaggtttaccgtgcccaatattttactctctgtcaatttcaatcggttcctgaagaaacaaggtcgagcaatgccaatgaaccctactcctactcgctagacaaacaactgaacgagaaactttccactgatatcctccatggcttagagaatgcgaccaaatccggtgtagacatggagagagctgcgtctgatgctgcagctcaaagtagaaacaccgcatcggctttgcaaaataccatcctctcgaggatatacatcaccgataataagaggggtatccactgacgatgattatacctaattgggatatggttagcaacaatatactgtaattgactcaacttcacgtgttggagcttttggtgttaaaaattgagtaagtagtacttatttgtcttttcttttcattttatttacaaattttccatatgtatgtgctgtatatagtatgtgccatgcgaatttcccgatcggggtgacgctcagtaagcaagcttaatgattacgtaatactcagggggtgcccagtactaaagcggaaagggaaatccaacttgcttgaccaaagatccggtgtattgtatgactatgtatgtgactacggagtaccggagtacggagtacatcgttaactatagaataagacatgacaggagtgacttatttgccacgtgccatcctttagggtctagaaccgcactcgctatacaggataggctcctcgctcaacttaggttttagggacaaaacctagcttagggaagcattcagctagacctactactgacttcatgtacctcactagttcactaggtcaatgtaacataacctactagtcgttaccccgacctagtgacctgatgacccggcgaaccccctatttatacttgagtactccgtattgtgtaggatatatcttccggtccagattgctgtcgatgctcccatgcaatcataatcgcgcggattattatgtgtctttcggctgcaggggttattagcacaccaatgggagatcagccatgtggaccacctttgtgatggaggccgcgctgagacaagctagcggaagagtcgattgatgataggccaacatgagaaacccttacgggttgcatgcatttaatccagtgacggtccggaatctggggccaatggtcaacgttgaacagcctcgttattttattcgccctaaaagatgccgtctgggctgcaatctccactatgtcttgaggcccaaaaaccgcagttctccggggcattgaggaattgagagcatttcatcgggaaagatctctttgtacaagagaaattgaagttggaaaaaacataaaggaaagatataacatggaaataagagttgaagaaaagttgaagatgtcaaagaacagaaagaaccaaaatagaacggggaggctctcgtgtggatctttttgtttacttgtggagtctcgtgatttcatctggacttggctaatttccttggtgtcttcctttctccttcctttttttttttagtatttttttctcgaaacgaatatacctagaaggtgacagctcgcgatgtttcgagctcgccgataccgagttctggtcatattcgcggcggctgtcgtcttcacattcttccactttgcgcggtcacgcgattggagctatacagtgattgaagagtctagcgttcactcacccgatgctgcccatccgcaaaacccggccgttgctgctgccattgaggagagtcgaaaccgcgtgcttcccgaccccaatcgcggctccacctcctccccaccacagacagagaagatcatctcgcccgtgggccccaatagcggctcaaaggacaacaaccggtttaaagatccctccgacactccaccagtgaagactcccatcaagagtgatccgaaggactctgcgaaggactctgcgaaggactctgcgaaggactccacgaaggaacccgcgaaggaaccagcgaaggtgggaggcaccgacagcttgccaccaccggcaacggagaataccaatagcgtaaatgatgaggaaattgataatggagggacaggcagaatggcagcggagcgccctgaacctggcattccaacggccaagtggaagaagttccccgaacggttccccgtccctgcagaggaggtgatcaagctgccaaagggagagacgaagaaaattcccaagctgcaagcgaagttcaaggatgagtcgagctccggcaagcaagagcgcctacaacgccttagcactatcaaggccgagttcacgcatgcctggcgaggctataagaagattgcgatgggacatgacgaagtcaagcctctgtcgaaggagtttgaagacccattcaacggctggggagcgacattggtcgattccctcgattctctctggattatgcagttgaaagatgaattctccgaggctttggatctgatcaaaaacattgatttcaaaacgtcactgagagcagatattccgatgtttgagacaaccatccgctaccttggaggtcttttgggtgcctatgacatttctggtcatcgatacccagtgcttttggagaaagcagaggagcttgctgaggttctcattggtgcctttgacacacccaaccgcatgccgcacctttactatcgctgggccccgtaagtcttgtcacaaattcttcctgatcatctagatgacgactaaccaacctttctcagcgagtatgcttcgaagccgcatcgggcgtcttcccgagccggcctagctgaaattgggtcgctttccttggagtttacccgtttggctcaactgaccaagcgggacaaatactatgatgcgatagcccggatcaccaacgaattggagaaaatccaagatttaactagcatcccgggactgtggcctctacgggtcaatgcacagggatgttccaagtactccaagaacacacctccgcgtgatagtagccctacacccgagcaaaaccttgctagtgcaaccgagactaccactacggtgacccacaagacttacgctgcaccaacagaccttgagagctatttgaagctcatcccacgagacacaagccctgacatcgaaagatatgcccagcctgccaatgatacgcaagctgccagtgagcctcgcattcagtcacgcgagcaaaatacaccagcagataaatgcaatggcggcttgatacttccccattcaccccgcgataacgggtacgccatgggaggaatggctgactcgacctacgaatacctgcccaaggaatatctgctactgggtggcatgaacgagcaatacatgaatatgtataaaaaggcagccgctgcggcccgcaagaatcttctcttccaacccatggtgaaaggtggacgtgatattcggttcatggcctccactagtccaatgacacctggaaagattgcagagctcactccatccgatcttgaatacgaaggcgctcacttgacgtgtttcgtcggcggcatgttcgccataggagccaaggccttcggcatcgatgctgatctggaacttgcagccaaactgacggacggctgtgtttgggcttacgagtcgacacaaaccggagtgatgcctgagcgcttccgccttttgccctgtgagaaaggctcggcatgtgagtgggatcaagcccgctttgacattggtgtggcacgctactctcgcatagaccccggggcaggacattcgttccgcgacggtgagagcagctacgaacagcgcgtgaatttgatctcgcacgatccaccccaaggatcttcgagcgggtcggttcccatccccatgccgggctcattaaacccccacgatagcgatgtgttgtccaagcgagatggactcgcattaggaaaacgtgcggaagcaattgctcctgcttcaagcccgagccctacttccagtggaaccgaactggaggaccgggatgcacctcgttcgtcttcgtcgcccgcttcgcctcacatcgccgaagtcggcaaagaccacctccccgcaggcatgatcagtatcccgtcaccgaaatactaccttcggcccgaggcgatcgagtcagtatttatcatgtaccgtctgactggcgacgaatcctggcgtcacaaagggtggaagatgttcgaggctatttcgaagtatacccgaacggagctagccaacgcggccatccacgatgtcacagcccagaaaccgatccacaaggatacgatggagtctttctggctatctgagacattgaagtatttctatcttttgttcagcgaccctactgtcgtggacttggataaatatgttctgtaagtgactgacgtagcctgtaaacaaactctgaccaagaactgactttttacaggaataccgaagcgcatccattcctgcgcccacttgcataattatgttttacattttgataccaatgaaagttctttgttctataacacataatctcccatagacctcgtaataacgtacaagataatgtgtcccttagggttggcccgtagtgggactcttgaattccccccaatcccccgcccttcaactctctccaactcttcaagccggcacataaaccggcatgagctgtctggtgggaaatggagcctgaggtctcggagactgagttctggactggtacgttgttctcagcccactattttctcctttcaagataatgcgacatgacaattgaccggttctcgcagaacttcaagcgatcgtctccaagccctgtgactccgaagaccagatcgacgacgctctcagagcctatctcgatctagcaacccaacacaaaggtgaatggcacttcgacctccgagaagcgatgttaaacccaacgacactccgaaaccacgtccgctcccaactttccttccactacgactaacacacgtgcccttccctagatgaatacctccggtcggaaacagatttctcacgctgttcctacaagctattcacgtcgagtatattcgccacacatgcggactacgtgcgacgacagattctctacggtctgctgcaggacgacgacccggataccctccacttcattgcgtcattcatcctctttgacggacgacagaatgaagttgtgcttcagatgctaaatgaggagggcgcgtttgcgcgtctcctcgagctcatacaggcgatgcggagggcggatctggacggcgacgcgggtcttcatcgtttgttgatggaccttgtgtatgagatgtcgaggatacaaagggtcaaaattgaagacttgggtgcgttttggatacacgtgtgcctgctgctggtagctgattatggggcttgtgtgcagttctcgtggatgacgatttcatccgctgtctctttgatatcatcgaagatctctcttacgatgttaccgatccgtatcattaccccgtgatccgggtgctggtgagtactttcttcaggatcattttggttagaacgggattgacaaattgaccagctggttctgaatgagcaattcatgatctcggctcacaacccggtggacggccggccctctggtcatttgaccaacaaggtcatcaagatcctatcagtatatggtgggatgtataagacattcggggagaacatcattcttcttatcaaccgtgaaggtaacggatcctcctattcaataaaggcaatgactgacaatatgcagccgagacgtcccttcaattgcttacattgaagcttctctatctcatatttaccacccctagcacatatgaatacttcttcacgaacgatctacacgttctggtggatatattgatccggaacttgctcgatctacccgaggaggccgctgctctgaggcatacttacctgcgtgttctttacccgcttctagctcatacacaactacgatacccgccgcactacaagcgtgatggacttcgagggctactcagcgtccttgtccggggacaagtctcatatgggaacgacgcagaacacgagaaaatactgcattttgaagaggtcgatgaaacaacccgtcgacttgtcgcccggtgtgcgacagtggattggctacgtaatgttgaacagcccgacgccgcagaaacgcaagatacccccactcaagagacaacaactacaattgagactgtcctagaagaaggcgagcggcatgcgtcacctgtagatatgggcgaaccactcgatatttctcacacactctcacggtcaagcacagtcgctagctcacctggtaccgcatcaccaacgcgaacggactcgtatagttcgtataatacacctgggagtcggaaacacagcttaatcaaccggctcggcatgaacctagagcccgcatctgcatcttcactgagcgttcaggccgttgcagcacaccacgaaaaaccaggcataatcacccccagccgcaaagacggagtccctgtcgccgctctcagtgacgagacgccaataatccgaccaccaaaggtcaagccagaaccaccgaaatctcgacgctggcgcgggcgccgtatggccgtggatgaagacgagcaccactctgccggcacaagcagtgacaggaacaccatccccgaaggcatcgaagtcagtcccaccactgttatcactcccagcacaccaccaccaccacagacacatagcagtgatcgcgactcgggctcaggttccactctcacaacttcaggtccaccgcgacgatctgtatcaaaccctcccccggccctcccgccaccacgccgttccagccataacacaccatcctcaagtcaccaccggcccgtcccagcagcgggaacaagccgacatggtcaggctccacttccgccaaaagcgcgccgttggggacgtggcaaaccccagcatggacagagtgactcggtcgagagcggggccagcagtgttagtccatcgaaggagcgtgaaactgctgaaaataccaccgtgcttgctcagcaagagctgtcacagtcaccagagcgcagcgttctttcggatccgttctcgccaaagtctcccacactggtgatttcgccgatcgaggttactgcggacaagacagatatcccagccgacggtgctggcgacgaccatgtgcatctcagtgtagaggaggcggtgcagaatgtttccctgcagtgagcgttacttctcgatctgtttaattcctttctttttcattattagatatactttttggctcccttcaggttgttttttttggcatcaagcgcggctgttcgggtgaacagattgggacatggtaggctatgtctctagttattttgcatggcatggatatttgcgaggacgtcagcgaggaccggatcctagaataacacaatagagtctatttgctgacaagaatggagtagtttacaatagtaacatagttggtaaaagtacaatctatctatgtcccaccaagcaaagcttgcctcggtgaatgacttaagtatgggcctagccatatatactaagaatgaagacgcttaaatcttcaacccccagcttcgccccagcccaatagcagtattccacccaaacccagcacactgtccaatgccggtaatcttatcagcaagcgccttccgatcatcaaagcgacgctctacgaacgccgccgtctccacgagatccggcgtcgggtcacgggtcatgacaacctcagcactggcatagatagccgacacggccagacgacgcgtgtaccaagtagcatcaacagtgtcatcaccagaaagagtaaggatatccgaagcaagggcatgcagttccgtaagagagagggggatattagccaagagcgacatttgcgcgagagcctagatatagacatagattagcatcccaatccaattctaaatcatgtccttcttgatatatcccaggaaggaagggataagaaaggaaaaaaactcacatcctgccaaacatctctaacatccgcattcatcctcaacctctccaaaagcagtccccgcacccgctcctcaacagaaagctcatggacatccttccctttctccgccgcaatgcgccggaataacccgccctcctcgaccttcccgcgcagcagaccccgacgactagcaagccagaagaggatgaggtcgaattcgccgcgggggagcagctgcaccgagacgtcgaggaagccggcgtcccgcgcgccgagggttagtgccgtggctgagaagccgtgtgtggggacgtgggcgagcgcggaggttaggattgccgtttgggagtttgtgtatgagtggtctgggagccgggcgtggaggtctgagtggtagcttcggtggcggaattgtcggggttggtttgttcggggtgtgagttgcgtggtgcgggtgcttggtgtggtttggagagttgttgtgcttagtcctcgggtttggcggagggattgggccacggagggggcgaggacccttttggggagagcgcgggcgaggtaggacatggtttgagtgtgcttgggtggtgcaatggggagatacggagtagatgtgattgttggagatggattgggttggtccgtgcgttgtagtataagatcgagatggatctggtgtattgcagaatctacatatgtatagtattatacttgatgtctgtctattttgattgctatatatgtgtgtagactggacggtatacttgatttatatcgagctaatgattgagtctgattctcggcttcagacatatgtacattttgtatgggatatacatacagaagatacaagatgaaacttccgcagaccatctttcaaccataatattattgaacaacatcaaagtgggatcataactatatactaatagtatacctgtgatagcaatgagtccaactgtagcagacattgtacgtagattaagtatttagatctgccgaggacttgaatgcagcaaagcaaaccgaggagatacctcgaaatgaccaccgtacgtgacccagaaatatatatgtaaaccagaaaagatacgatgaaagaaagcgaaggcacataaacgaacggcgacaaggacaagtacgaccacgatggatacgaaagcccgggccgttagaccaactgctaagatacatacgattttcaaaggataaagactagcaaacctacgaaacacaagtggaagaagatgctcattccattttggaaacaattgatcagcccaaataggcactcgaaacccattttgcgaggacgaagccacgaaagaactgaaatgggaataagggaatcatgaacaagacattgcgaaaaaaaagccagacgcccccctgtcaaagaaagtgactaggtaaaacaaggacgaaagtgctttacatgatctggtcctgggtcagaccgacggtcgactcttggccttccatcatctcttcgggacctgggccagcgttcatgtacttcacgaaggtgatgcccaggggacgaccaccgtactggtagccggagaatttagctgtgagggaagaatattagtatatggattggcagtcacgatacaaatgcaacgtaccaattgcagtttcagcagtatcagcggtgtcaaattgaaccacaccagtaccgcgggagcggccgttaggctcgtactggatttcagcgcgctcgactttaccgatggtggagaacagatcaaccaggtcatcattacaagtagaccagggcaactaatcgaagttagcattccatatgttgcccatcgcgcatcccaaaactcacgttgcgaacatagatgacagcgctcttgtcaccgttggaagtggcataatcagtgaaagggttggggggtccggagggaacaggaggagcaccaccgtgctcaaacccaccggcaccggggaaaccaccgtggctaccaggggagccaccgaagccgccgcgtccagcgaagccaccgccaaagcctccgcgaccaccgaagcctccacgacccataggaccgccaaagccgccacgaccgccaaagccaccaccaaagccgccacgaccaccgaagccggggccaccaccagcgaaccggtcttcgcgaacttcaaggggacgaccctgccaatcgtatccgttgaactgcgcaatggcgttgcgcgcatcatcaggagactcaaaagcaacgataccggagcccttggggcgtccggtagggtcggtgtgcacatcggcacggatcacggcaccttgctgggctgtaatacggagtcccggtcaattcaccttacactagaaaaaagtaggaatccaagtccaaaaatccgcacttacctgctgaacggaacagatccttcaagtcttgccagccaacgttgaaaggaagctataccgaacggtcaacaaagcctgcagaacttagcataacgggggtaaaaagaggggacaaacgtttgagacataaatttggcggccaccgccaccagcaccaccctgggggcctccgaagccaccaccaccgaatccacctcgggcaccggggccgaaatcaccgcgtgggggaccaccaacgaaacggggctcggattcacggtcctggggaaaagtcagtactaatcgcaacaccaacaccatggaatctttgaagacatacctcacgaacataaacaaggcgacccatcaggctctggttgctgagcgtattcacggcgttttgtgcttggtccctggttgcatattccacaatcctagtatacatgtcagctagaacgtcaatttgaagaaagacaagaaagtactcacccgcatccctacaaatcaggacagccaaggtccacccgtcaaccctatacaaaccacgagaaagatcggggaaatagaaggaactagcccctctacatataagcgcccaccttcgacattccattaggaagaagcaaaacatctgcaaagagaacttctccagctgtaaaaaacaaggcgcaaccaggattagcttcgatcgttccaaaaaatcaccaaattccaatgcgcaatccctgctcaccctgtctcataaaatccttaagatgatgccacttgacatcatacgaaaggttgccgacatagacccggcggtcttgctgggacgaatcgcgaacggtctgcatcatattctccttggcggcacgatcctcgaatcgagcgggggtatatccactgcgtccaccgaaaggagagcctgatcctgggggtccggttgctgctccggaagcactcaagggagatctggaacggcgttcgggacggcggtattcctcacggtcaccacggctgcgggagcgactccggggggagtacgaacgacgggcgcgtcgggggggactgcgagaagagcggcgacggggtgagcgagacctctcacgctggatctggtcagacatgaacaaaaagtagatagcaacggcggtcgcaaaagcggggcaatattataacgtataaaattgatgaaaaagagatgggacggagcaaaagacgtgttcagacggcagtcgctatgtggaagtcgcaactccgaggggggtcgtctgcggcgtgggtcatgtgaccactagctctgggggagtttgtctcggatacactgaggacctccggagtaggagcttagggccactggcacagggtgtttgtgcacacatcacaattaattttcagaatcacataacgtgatagtaatgtgcttccgccttgtggcccactgatctccagatccggcagatatctgatcaagtagacatggcggttcccacccccgcactgaccacacgccagcgatagcgacctctggtatagagctgcgagccatgcgcacatattggaatgttttgtagagtcgctggggaagaggaagacaaaaaggaacacggggctcgcggcaaacttacttggtatggtcgatagacgtcggctgggcggatgaggctgtcagcggagaatctcaagaaaccaaaggataggaagaaataggaaaaggagaagaagcggggggaaatgaaagtaccaggcgtcaaggttcaacgcttggggggggggagacctgagaaggtgattggatgaagggctgaaattgaccggggacccttcgagtgtaccaggcagatgagagtaacaaacgagtaatacaaagatacgaaaaagcagagtgtaataatccagaggacgcgcgagaacgtacccatgattgcgggctcgatggagcgccgagatacgttgtacaaagacgaacgatgggagacgggggaggtgaaggtagaagggagcggaagaagtgttgttctttggattccggatcctacaaagactcttggggaaatatcatggagagaagaaaatacagaattctgatatgtacttgaacacctcgggcaaaacccgtcaccgccccggcatatagttaggacctggtgtatacagctatggagatatcacgggggaaggaacgaagctgttagggggtaatgtgaatatcaacccgctctttcattcctaaagaaatatcacaaactagactatgacttatgtactgcctagatatgtacatcaatgtagctcctgaccatacagaccagccttatcgttcttatcgctcctctcacctcctgcgcaccaacatacaccattggacatctgcactcatgactggctgcacggcgtatttaagttactaaattgccacggcctgtaacctttcggaagactgtatccattcaactggaccatgctcaaaggttatacatggaaaagttatttgcactatttaagccttctctgccgtttacctatagaactttatcaggactactaagagaactactagaaaagactaccatcaagcaaactgaatcatgggctgcaaacacaaacaactcttcgtatgcatctttaataagaaaaagaccccctcacttcaataaaaaacctcaaacaataagtcctaccgggaaacaaaacgaaagaaatgggtgctgagtacccagccttgggaatcaagaatcaatccgcggaacaataaacaaagacaaaaacatccattgcgccacaccctgtctgtaaaacgaacgccgatgcagcatgacttttatgctgtgcgagagactgatccggtgtggaaacagtcctaacgagaggaccaaaacgccttggaacggacgagttgtgtaaggggcgaggagtgggacatgtacagataaaagagaacatcaaagagaaatagaagaaatggggtaagaaagatggaggaacaaatgtggagatgaagatagaaagggtggggaccctatgctgccacattggtacgaggataacggcctggcatcttcatatccagagcaatggagttgtctgtattggaacgcagcagaattggaaccttggctacgctgtctgattcgagaccttggtggataggaccattcccaagaccaacggtctggatcttaggaaggtcgagttcgtgatcatctaccgaagtaggattggtatggttcgtaaattcagtcgcattggtgttggtgggcaccgtagagacactctcccgacgatcaatctgggcaggagccgactgatcgcgacggttagagataccgacacccgagacggcagcaagggaagcctgatctccatcggaccggatatcgcggtcatcccgattcgggggttccagctgctggctctgcctcttcttagccactgccacggacggtccgatccaatcaccgtagtagctatcgtgctggttactatcagggcgagacctttcatcggtcccgtcgttggatctgtagctttggtaggagttgcgtccgtcgccgctacctactggtcgcaagctgtcattaaaggcactagacccatcggggagggacccagcagcccctaacatatctctgccagcggagctatccccgctggaaggtgacaggggcgcttggaggtttcggtcaagttggacgtcgctggggaacgcgcctccagcctggcgagaggaggtggggcggtcgtgagtcatgaccgcagactccgcggcgtatggagtgcgatcggcttcgtcgtcctccatcacctcattcaccgacctgccactcacgctgcggacatgctgccggacaaaggcgtttcgcgcctctcctgtcatgccaatcaagccttcgatatcttcataccaggacatcatggtctcgtgggattcggcgcggaagacccacgagtggcctcggtgcattgcgccagtctgtcgacccttcagcataaacttatgggagcttgagtcttcctgtgagtgggagccgagtttctgctctggaagatagagagacatgacaggcgtctgccatgctacacgatctgccgacttgaactcgtgaagatgtgttggcgacaacacatacctagagttgattagataatggcttcaaaccgcacggtaaagaagataggtactcaccagccaggagtataactcttgagatacttgctcttacgctccaacataccagctcggacttcagctgctgctggatgatccttgccagggtatgtgatgctttctacatcccggagaggaatccgaggatcgacaagttcttctgtgtcggcaacaaactggttccactcgaaatcttggggcatggagatcggacccgcctggagcttctcaacggtatcaagagcttcattggcttcgcgtcggaggatactagcgtacgcattgtatgccttctggatctcgctcacgacaatcccctctagttcacgaccagagttctctagattcaagaatgcctatagaagcaacattagacaggctactaggatagacaaagttatcacaaacccgatgcaagtagttctcctcctcgatctgtttctcgacctgcttctccacgcccaggcgcaggatgaatggatcacctttgcccgatgtcgcagaggcatcggtatcgacaagcccaagagcctcttgcaagttccgtacggctttgcgtgtgccgtcaacctccttgtcgacggtattcttgaaatcagccgagagactcttgatctccttagtcttcttctgaagatcactgcggagaccagtcaattggctgatcacctcgacctccacctcgacagctttattggcctcggtataaccctggcggtggaaattctggaggatctccgtcgcatcagccagaccacctggctgaagcaggcccggtggaagagtctggttattaacaacgctcgaagcagataggaacagctttgctctagtttcgtaggatttctgcacctccttaaaaaagagaatcaagtccttcagaagcttgcgccaagctacaaatcctagttagcaaagtctccctagcccgcgcattgacaagagtaaaagcccacctccaaaccgattcgccagcacctcggtcgggttcccattagtagggaccggagtcaggaaagcactattgacatcctccgcgccatcggcgtgatacttttcgcgatcgcccaagctcagactcctcacactgccggcgcgcatgctcctccggctcccactgcgccgcaagctccccttcttactcagcgaggccttcttccgcaaggtgctcgaccgggacgggctcgaggattgcacgtgcgacatggtggagacagagcgctgcactccagggcgatcgaacgccgagctgcggtggctgacggtatcaaagtcctccttgaaacgggggttgtggggaacctgcgacgactcgagggcgccggagctgtactggtatgctgacgtgccggcgaatgaattcggtcgcgacagagtcgagcgcgggccgtacccgcgactcaaagccccggggtcaatttgcgggaccatgtatgcatcctgtgagggcgtctgtggccgcgcggccatcgccatatctgcgggaacgtgggatattatggtttatgcaggtgtctcaggatagggagcgaagcagaggatcgaaatttggccgaaagttggaagtaaaaaattaaagaaagggaaaaaatgggataatcaggataatcaggataatagctccaagagtttacaggcctaaagtggcgtcgtttctggttacctggcgaacggagcaattgtatgcgggggaggtactggcagcatgagattcgccccactcggttggaaaaaaaaaggagaagatcaagagattgggctgccgacatagggcagagctggggaattaaagggaaaggaaattctgacgatgacgtctacgagatgcaagatggtgacgaccttggaagaaactaggctttcgggacgaccgggagaaaagagagggggaaaaagccatttgacttctcgttctctatatcttcgtggttgacgtactggatcggaattcaaagccgtctttacagtgtttccattcattctggttcctatactgtaaatagcaacgggggacttgtatacttcccttttatatggctgcctgtacgagaagtggctgagggactccgcccctgaacagaacgagcaagactattggaataagattattattgcgatcctctcgtgcacaagatccactcgatctgtggctcatacaatataggagaagaaaaataaagggggcgaggcacccttcccctgatcatctagtgatgaacagtgcatgacgtttggatctggggagaaggacagatcaagggcagcgactttgacatgttctccccggctcattcggaatactacatcttcacctgggtactgtcgagactttcttatctggctgttacatattgtgagtggatttcgtccgggccccgaggtcgagagtgggctgttgcttggcatcacgtgcgatgtatgcacgtcaggtgatatataaggttccaatatccagaggtacaatataacacagaactcaatgtcatatggtaaggaacaaggtacgatagtttattcgagagtgcagatatccattatacgctctcaactggatggattcatatttattagtgaataaagagacaactagtatacaagataaagcgccaagctaaattttcattttatgtaaaccatgacgcacagaaaatcgacatcgaggtaactccgaggccggctctaatttagcaatactaagctaggaaaatactgagatgtatttctcatatttaagattcattgagatttgagcagctaataataacagtttaagtattaccctaggttcaagactgtaattccaactgaagtcctccagattgactacatagattagatggtgctcgcagaaaaagtgggtaaagttcccccccggccgagaaaatgtggcgctcgacatcatatgagccatttgggcaaaatcaaatgccaaagctcaccaaataggcgtataagacagttgcttcttcgattcatttcgttctattgaactgatgcaaaattacctattctgaagacagtacggagtagatgaattgagaattacaattgcacgtactctgtacatagttcaagcatggtaattatgctcgaaggtgacctggatatactgattgacatattctgtacaaagccacgattcattatgatcttatactacatttgtcccttttagcctggaaacatactcgaagtcctccacttgtttgatatacctgcactgtcattggctcccgggtggtccggggataccccctcattttagagtattattattgaacaccagagtggtacatccatggatatctacttctagattcctccgtaatacttcttgagttccatgcgattgatcctacgggtcttgtagtctagatttgattgaggggcctggactagctactacactggtagtcacttccagcaagtatacccagaactgctcaattgttggtccaatcttgaatgtgtattgttttgaatttcctggagactaaagaaaaccaaatcggatgggattgtccgtacggtaggcagcgtgatatggggggataatttacacaaagcaatggaaaaaggcggacggcggactgggaagaatgtaggcttatgatgcaggaactggggatgtgggaacctcaatgccgtaattcgccttgagacgctcccggcgtctctcttcgtagccggggccgtagatacctagtggagtcagtatcggtagacaatgtcgctacccggataagaagcacataccacgtccttcacccaactccttgatggtctgctctgcggaagtctggaatgccgtgcgcaacgctgtccggcgatcgaactcgtccacggatggatctgactggtatccaaacagggtgccaccggtgtactcgaaggcggccatggcggtggaaagggcgacaccatatccgagcacagcggggagtgtgcggactgaggtaaacccgattagctccaagtacataaccatatactcaattcacttcgagaacttacctcggagaccgagaatggcaccggagaagaagccacccagagcgacgttgtagtggtcctccttctcacgcaggttggcggaagcgctcttaatgaactcataggtaccacccatggccgctttaacatgtctaatttagccattgctccatcacttataggtaaaaaagcccataccaaaggtagtaatgatgccaccgccacggacgaagacacccagagttccgacgttctgtttggtgagcgtgttctgcacagcggctgcgaagagaccgacggttccggtcagcgcggtggccttcagggctgccgaaatggcatccttggggtgataggtgttatcttcttcgtcgtggtgcgccatggtgtgtgtgctgatagcagggatggactgcttgcggtatgagatgtggttggcgataggattttggaagtcggctttctgccatacctgaccgccaccgcccacccaacggagctctacatggttatgttgatgcctctttcatattgaacattttgattcatttgctatcatcgggaatccccttagatactgcttactgccttctaagagtgggtcttgatctcaaaactgtcaagttcgtggaggagagagttccaaagcttgccagtgcttgctgccaagtgcagtgggctccccgcataccatacagtggcgatttcatcatttgacaatattgtcatcacagctgagctgttgcattgcgtgcttttctgagcttcgatgagaattaacctttgagaagaatcatatagcatcaaagcgcatattcaaactgcgtgaggcctacaggcccgaacacagtacttcatggcgtctgtacagaaggccggtaagagctcggaccagcaaacccggaatataactcgagcgaatgcttacaatattttctatcaatcatacaggaaagactgcgccacgtctcatttatgatgtccagctgtatgacccagcacacgatccagacacaggccgtaatctcctctcagaaactccacccatttatccacaaggctacaaaggcttacctggattcatatcaccagaagcatgtcgacacgaatatgccttgaaagaagaccagaccttcatgtcagaggcagagcaccggagaaggcctggtacttcgtccaaggtctcagccatatgcacaaagtgtcgttttcatcttcaagtggtggtcaactacaccagccatatgggcgcattcggtcagaaccaggggaaacacttgcatcatttggtctacaaatcaggacggcagaagcatggccttgcgctaccagaagaaactcccaaggggcagatcgcggagacgtatcactaccaatgttcctacatctcatgctcagctatggtgtctttgcgaattctttcaccgattttgagcccggaattcatccgcttgatgaccgatagagagttattgcggaaacgagcccaagaggccactgcagcgtatgctgagtccatggaaggcatgggtgatccgcagccgatcaatgtattggataatctgcgtctgtacattaccaatgccctacgaaacccacaacgcagcaagcccatttcctctgtcaataagaggttcatgcactctttcggcgtggaaggtgctccttgtaaagaattacttgaatttcttgagtttgtgtatgataaggtttgttatcaagatattgttttctcatatcgttcactgttgttgttttcgctgacgaattgactcaggataccggggcatggcacccacccaaaccgacctctgtcgccgaaaaaccttaccaagacacattgcgtctctttctcgacgacttgctgcatgaattactggtcttgatatatcatagaccagcctcggaaagaaaaggaagccagattcccgatcttccttcttctgccatccccgttatttcctgcgctctagaagcgcaagactgtgtgtacattgtgccccttggccctagaaaatccgaactaattcccgctccagatccgaaagctattcgttataaggagtttgaaatggctcatgctccgttcgtacaccctatattcaaattgataggactggatctgatacatgtttctttagtttctatgaagacctgggggtgatggaggatatgtcctcgtcgactgtggtcgaagcatacaatcgacagatctcagtcgatcctggcagaacctcgctgtacttgtctgctctcaacgctgtcggctttctgcgtggtgccgaagacaaggaaatcattgacatagccgtccagggagcatatgaacaagggaagtacaccgttgaggatgtcgtcgtcgcgtatcaatacttcaatctccacttcgatgatccaaacctcactgatgacagcatcattggcaaattctatgccttcctcagctctacaacgcaagagactgaagcacgtcagcagttgtggcgaattggcgactctaggggaagtgcgcgtattaaagcggcatcagaagagcgtgtgttgaccaagtcatgtcatttctagactttaatgtgtgctaattttgacaataggtgtttctaccgttgaacaagcgaatgtcttcttgggggttgaggatcagaccccagatgatttcgtcatgaccatgtacaccgcaaaggtatgtttctcgatcgcttcatttgtgagtcggacgccagctaatattgttataaattaggtcaatgacaacccacttaccaaagaactggcgaaacgcgccgtggcactcattgccgagtcccgcaaatcggtcgcattgaatcacttcatcaataccggagagatgattgctggtgaaatggacattggtgatgcctatcgtctactccaaatccctgatcgaactgtcgacgatggggcaatcatagccgcatatactatctgcatcgatgaaaacccaggggatgccgagagatacaatcaagctctgacgatcattgccaagcaactggacagctcgacgttgaggaatatggcaggtatctccaatgagcctgacagaagcatgaaagattggccagtcggactacagaacatcggcaatacatgctatttgaacagcctgttgcagttctacttctccgtccgtcctttccgtgagttggtcttggattttgaacgcttccaggtggatttgaatgacgaggaaaacctcgcaaataaacaagtgggatcacgaaaggtgacgaagaaggaggtcgagcgatctcagcgatgtaagttactttgtcagtgccgatggctatatgtctcaaactgaccctgtcctttgcagtcctcaatgagctccggactttgtttcgtagcatgatcacctcatctcagatatcggtttctcccggccaggaacttgctcggttgaccctgattagcccaagcaatgaggcggcaatgcgtcgtcgatcgacgataactgctactagatccgatattcttggtgaaatcaacggtgctcctgttctagggccccttgggcctccgcagtcccttctcggtgggcagatggagcccgcttcatcttctgtccaaactgatcccgtacctattcgaaacgcgaccgccagcgataacggaagcgatataacattggtctcggataacagcatggacgatgcacctggactctttattgaagacaaggagaacaaccccccagacttggaccaaatgtcggatcaagcagaagcaggatctccccaggacatgaatctcgacctagacgacagtgcatcggaaatactaccaccccccgtccctcctcgcaacctccctcaagttgatcgggaaaaacaattgaaggaggaggtggaaattggtgcccaacaggatgtgacagaagtcatcaacaacgttctgttccaaagccagtgcgccatcaagcctcgaggcattggcagtgacggtgaacagcttgaccaggtcaaagagtaagtcatgacagccgtacacgattgtacctattttaaccctctcatcagcttgttctacggccaaacccgctcttacatctccaccgataaaggcacacgttcgaaggacgaacgatggtgtgacatcaaggttgatgttgctcacggatctagaaacatctacgatgccatcgatggggcatttgatattcaaaagatcagcgtggaaaactctgtggccgagcaattcgcttccatcagccagcttccgcctgttctccagatccaggtgcaacgggttcagtttgatcctgtgaagaaatgttcgttcaaatctacaaaccatctcgggttgcttgaaacgatctacatggatcgatacatggacaccaaaaatccagatgttgtggatcgacgaactcaatgctgggagtggaaggcgtctctgaagaggctcgaggctcgccgagaagagcttctcaggacaaaggtatcgaatattctcagtcaatgtctacacggctaacatttttcttttccgtaggagggcaccggtgtcgatgttgcaacattgttccgtagagttaaaaccgcacttcaagatgtgaactccattgagaacgacgttgagaacgacaacgaaaacgacgttgagaacgacaatgagaacggcattgagaccggcaatgagaacgacactgaggccggagcggagttcaggtccgactccatgaatgctgtggctagcacggagttactggaaggtctcgagtctcttgcccacaaggcagagaccgacctgcgaggtaagagttctggcgttgctacttcctttgaaacagacgtgttgactctttttgtagctgtcgaccaagaaatccaggatacgcagaccatgatttccagccaatttgccgatttccataacctcccatatcgactgtatgccgtttttgtgcatcatggctcagtctcattcggccattactatatctacatcttcgactttgacaagaagatatggcgcaaatacaatgacgaatacgtcaccgaagtccagaacgtggatgagatcttcaagaacgactcgaccagcaaccctccgaccccgtatttccttgtttatgtcaacgatagcatgaaagaccgtttggcaaatccggtctgccgtgaggtatctgacatgtccgactttgccggtctggaacaaaccacctccatggagggtgttcagcctaccagccctgcgccagacgtgaatatggaacccccatcctatgaggaagcggcaggcatcaatggaactccaggtacgggaaacacagtatccgacccggagaccacaacatgacctcgtccggcgactgactcggagcagtcttggtagattccaatgccgcgcccctcgattcggccgctgtcaaccctctaaaacgcaagagtgttgacgaaatgaaatcgatccgtccgacttaatttcttactgtgtggcacagcaccttggacagcatgataacatgattgcatgaattctattctcgattatcttatgtctgcacgtggatattactgcattgcgaggtgtgaaatgtttttgttatccagcatgtacataggctgaagataccatggagtacttttagagtaagatagtcgaattgatctttctctctattattgatcttctacggagtacgctccgtactccgtcctgctcctttaattggttgttgtcccgggtaaaccttggaaaacatcaggtgaccatattattaagctgacttagcactcccgatttccacaagccgcggccgcggtaatcggatacggatcggctgtgatttcggcagcggcgaaaggaagtcgatccgccgatggaggttccgaagataatgagtatcaaaaaaagaatgcgatgtgtgtatgattttgcagtaatttctctgggatatttctaatagttagtcaataagttcagaggctccgggggttaaatgtattgaaatcggggcggttcatagtaggcgggagagagccgggaatccacatttccggggaaacgaatatcactcgggtacgataccgctcacactgccgtgcgggaatataagaagtggctattgccgctaccacaggcgtttgatctttttacaccttgatgtggacttgggattctttagtataatctctcatctaaaagtcgttcactatgccttcccaagtggcaacatgtttgcgcctcgcgcgtcagttctccaaccctgcccaggtaagtgatctgccctatagttctttttgagtcgtggagactgacaatgtcttgccttttaccagcaccaacgtttcattgcccgcgcattctctagcagtgtccgccgcagtgatattaacaaggtgtacccctccgccgaggcggcagtcaaggacatgaagtctggcacgactctgctcgctggtggattcgggttgtgtggtgtgcctgacacgctgattgacgctgtcctgaagaacccctctatcaatgacttgactgtggtcagtaacaacgctggtattgacggagctggtctcggtctgctcctcgagtccaagcagatctcgaagatgattgcttcttacgttggtgagaacaagaccttcgagagaatgtatgtcactggtcagatcgacttggagctcagcccccagggaactctcgctgagcgctgccgtgccggtggtgcgggtatccccgcattctacacacctgccgcctttggtaccgtggtgcagttcggtcaggtgcccctgcgacacaaccccgacggcacagtcgcaaagtacagcgagccccgcgacaccaaggtgtttgatggcaagagctacatcatggaggaggcaatcaaggctgactacgctttcgtcaaggcatggaaggccgacagacttggtaactgcttgttccgccacacagccaacaacttcaacggcgccatgggccgtaacgccaagatgaccatcgttgaggctgagcacatcgtcgagcccggcgagattgatcccgctgccgtccacttgcccggtatctacgtcaagcgtgtcatccagagcactttccccacgcagattgagaagtacacctacgccaaggaggagggtgctgacaccgctgctcttggtaagggtgagaccgccaacaagcgcgagcgtattgtccgccgtgccgctaaggagttcaagaacggcatgtacgccaacctcggtattggtatgcccgtccttgcttccaacttcgtcgacccctccatcgaggttgtcctgcagtccgagaacggtgttctcggtctcggcccttaccccaagaagggtgaggaggatcccgatgtcatcaacgccggcaaggagactgtcactctcaaggccggtgccagctgcttcggcagtgacgagtccttcgctatgatccgcgccggtcgtgtcgacatgaccgtccttggtgccatgcaggtcagcgccaagggtgacttggccaactgtacgttttcccgcaattccttcgtttatgcatataactaacattttctcacagggatggtccccggtaagattaagggcttcggcggtgccatggacttggtctccaacccctccgccacccgggtcgtcgtgaccatggagcacaccgacaagaagggtaaccccaagattgtcaagacctgcgagttccctctcactggccctgcctgcgtcagccgtatcatcaccgagctcggtgtcttcgacgttgacactaccagcggcctgactcttattgagatcgccgacggtgtcaccgtcgacgagatcaaggccaagaccgatgctcccttcaaggtcgccgacgacctgaagcccatgctgtaaattcgcatgcacactgtacgattctttaagcgttttgtatatagacattaggagttagattgtttcaaattaaggacatatcctggatatgcatcaagaggagcattgctctgacaaaaattcatacattcgagtagaaaggatagtactagttgtacaataaacaaaaaaagagcaaaggtattggtacatgtcatgcaacccatcatataaaaaaccccataatgctgacccaaatccagtgagacaataatacatcaagttttcccaagtgtttccaagttttccaacgtcaaagaaccaaaagtctatacataacagcaagaagaaaagcatcacgtcaagcggataataccagccagtctcttccgtaaccggccaaaccaatcgcggttcggtgcctctgcgaactcacggatgacattgtcatagtggtctgggttactagctggccggcgcagcttctccggcatgggatatttacgcgcgtagcggttattcagcagcgattcaagtgcattaacggaggactcggaaattgctgggccggacttgtctgcggacttgagacgggattcgatataggcttggacggagactgaagccgggcggactgcgtcggaaggccaatgcttgaggatgtgggtgaggcgactttggagggagcgcgggttgagggcctggatgatttgttaggagatttgtttgggattgagcatcggggggcttttcgatggtgttgggataattcagatgttgggtaagatactcacaggtgctttggccatggtggacaagcgatatcacacgataattgtggtctaggggaaggatcttcctcatggaagttgaggcaaagaccggaacagtctattttggcctggcgcatcaggcatcaacagccacatccattcctgttgccttctcgtcgaccccgtcattttgccatccccttgtactctcattatatcatttttttcttttcgccctaagttattcctgtctcaatttcctttctgattctattcagggtcgcttcccgctcagctcgccatgagctcgcagcgctattcacgggtacccaatccccctccccgctgatcccctatcagaacaagccccttggatgggatccctcggcaacatactgaccgcgactgtctaggtgaatgcccaggatgaagaggaaggaccacattcctatccgctgaacgcgcgacctgaacatagcaactcttcaccttcgtctttccgttccggatcccgctcgtcgtcacgatcgtcaaggcggctattacaccacgatccgcaacacgacgatgacgaacagacactcgccgatgcttttggcgacgaagacgggtccgatgatgataatgagccggatgaccgacagcgcttgatgcgagcagactccgacttccgtgctcccccggataacggccctaccaccacggcctcttcgtcggactcgagaggcgatccgcaggatcagattcaatcagggcttctcaggcgaccgacgctattaccaagttttacgaccccggcttcgggagggagtcggcagatcgcctcatcgaatgatggagtctttgccaatcttgctgccaagcctgaacggggtgagaagaatgatgatcttcctcctgtaagttgatcattgatatttttgacccaaaaagaaagacttatttactgatatcttatagtcatacgaagaagccgcagctgatgcgacaccgccatattgggagaccaccattgtagctcctggtatctcgtcagacgaggtctatgtcgatggattgcctgttggatctgttttctcatttatttggaacgccatgatttcaatgtcattccagctcgttggcttcttgctgacctatcttcttcacaccacccatgccgcaaagaacggcagccgagcgggtctcggtcttactcttgttcaatacggcttctacatgaaaggtggcagcagcgacagttccggctccgagggtggaggctccgaatatgtccctccacctgaccccaacagccacaacttcgaccctaattcggttggtgagggtgggggtaatggagggaacggcgccatctctggcatcagcaccagtgaatggatttcatatattcttatgattgttggctggttcatcttaatccgtgcggtcagtgatttcctgcgggcacgacgtcatgaacagcttgttttgcagagcccggatcgtggcttgggtgtaccagtcattgcagagggcgaacgatccgagactgttgtctaatatcgatatacggattctcacttgaatcaattttttttttgggacgtggacatggacatggacatggaaatgtctggcgttgcagcatggagtttcttattgtatcgacaccccctaggagtactgcctccggattgcattccttcaatttttcctttcactttatcacaccattttatctttgtctctgaccgtgtagctattctgaagataccaaatatatgaacaatgaaccatagcagttatatttatgtagtgatgtcaaccctaagtcgagtctcctagaattccactaaccacttcatcagcttctatgatcatcgcactgtttcctcattcaagattccttctagagtgaaatatcccgcagcgccacccattctctctcggctacaggtccgtcttatcattttatgccgcggcctagtgcccccagtcatagtgcgcctactacagtgcccagcacccacctactatgcgctctcagttgataggacaatggtccctcgttgaacggaatacctatataggatataccttgcctttacacctagtagcgcatccgagaaaacgtagaagcggagaaagtactcatcgctgctccagtatggtggtcttccgcactcggatcaggcacaccgtccagtcgcaccaggcctcgggtatatcatgcgcgtgcaaagcgtcgagggcgaagtgaggatctcttgatgacgaagacgtggcgacggctgtctaaaaaaagaaaggcgctctcagagcgcgtgcgcaggagtcacagaggtggctgtttcgtctggcgttggaaccgaggaaaggttgttagggttagaagggcttagattgggcgcaaaatataaatatggatgttgctgtaacatagtcgtcatggatgaggtggaagttagtggaaagtgcggctttcggtgaatttctttcagtcacggggggtcttcgggggattgacagccattcatagccccaacagcggtaatttccagcgtcaattgtattggcgaccgcagattccatctatattgtaggttgttacaatagatagtagatcccaacgtaatcgcagcccaagggttgctgcccgcgcatactgcgccacgataggcagcattctatatccttgtcctttgcccttgcattcctttgtttctcgcctgtgtaacttcaccccattggatgaacagaaaggagcgcagaaaagaagagaaaacagaaaacaccaggcccttcttcctcggcggcatgaccaactccgcccactgccgagagacccattgtttatttgttaacctcaaccccaacataaccccagtctttctataattcacctgcgttccttgtcggggtggatcgcgggcttgtccgcaatgtctaccatccctcagggccccgttgaggcacgatcactgtcgtcggttaccactatcgcatcaaatccccccgcctatccgcgcaatcctacccacgagaagcacgaaccactctctctgtacattgtgcgtgtgccaggaagcaaaggtatgagtcaatcccatattgagactatgctctctttcttttggtcttcaaagccccatagttgcgcgttaccgtgctttaacaaccccccaaaaaataaaccataactaactgctatttatatgtgcagacatctttctctcgcctctcaaaccaccgactaagtctagtgtctctgctgaggcgatcaacgcctctctttactatctccatgtcgcgactcccgacgatgataccctgctccaggaagtagaagaagagcgcgcagaggaggcccaattgcgaaaggaacgccttgagaaagcgggcggcgatagccctgtacaacacgagttcgcgcggctgaacaatgtgcgccggaaaccagttggtggaggaggtgatcccaaccccgagcgctcgccaacaacgcctcagcaagatgccactgccttgccatcacgtccgatccctgtgttgcaggataaacctgcctctcctgccttgccaccacgtccggcctttatgccgcatgctgctgcttcgccgaccttaccaccacggccaatctctatgccacatgccgctgcttctcccaccttgcctccacggccaatccccatgccgcaggttactgcggaaaatgtatctttctctggaactccagtggctaatatacatatgtctggaggtgtatcaggagagtctggtggtaagagcggtattcggtggcgacctttaccttccttgccgcctggtgaagagtcatgggccaattctccagcaggcgaggacccgtctaagaggacatcccgatggagcgcgtttgccgaacaattgcagagtcgaggagagaactggaaggaaaagtatgaggcaaagtacgaggcgctgtcggctggccgtcatagccttgactctactagaccacaattgcggccgcgttcctcgcataaccgtcccggatcaccattaggaagtccgggacaatctcccaaccgccatagaaactcaaatggaaaccctcctagcaatgctggctttcatatcacgctcatccgacgcgatcccacgtccggtacacaatggaatgtggcaactatatcaaccccacgaatggaccgcaataccgtcgatatcgagatctccacgccggggtataacaggttcgcaggctccaatgagttgccttcattatccaacctagcggtcaatattccgacagggattggacgcctacccaactctgccattcctcaaaccttagccaccgagcagtcaaaggagcagtcaaccggcccacgaaaattccgccgccagctctgcgtatcgaagccattcgacgactccgctgccacggatctcagcaacggccttaaccaagatggtccatcctccaagctaaaaagcggctactacgtcttcacgtctccttggaatggcacatgtaccttcacaaccagcgtgaacggccgaagcctcaagtgcaaacacatgatcccaacacccggcggcttcatccctacaaacggtgaaacagaagcaccccccgccgtaactgtcgccgagctccgcttcaacacccccttccaagcagcaaacctccactcgcacgcccaccacgcagtccacaaaccgcacccgaaccacatttcccccttcacccaaagccaacttcaaaccccgaccatcccccgggcaaacgactacccaaacgacaacaactcctacgaagaatccctccatccatccatctccaacaacagccacgcagccgcaaagcgcaatcctctcacccaacttctcaacccaaacacctacacccggccgcgcgcacactcaggcccaggcccaaatatcccacctctcccggcctcgcccccagcagactcacgtccaaatttcagcccttcaaccatcctccgcagaacctccatgcatgcgcaccgcttcgcgcgccatagtcagcatcattctacttctcagtcgcattcgcaccgcagtacgagtaatagcagtggcggggatttagatcacgagtctgatgaggatcgcttggacttttcgcttgcgagggagcctgctggtggtgggttaagggggaagagtgccaaactggggaagttggttattgaggatgagggcattaaaatgctggatttggttgttgcggcttgtatggctgtttggtggcgggggtattattattgagatatattgatcttttttgatataagatatcctggcttggtctctagggcgagtctgctggctatagtcggttagttttgctatgatagcgtatatgaatatatgaattccattttgtctggtctaattatccctttgtctgatatatgctatttccaaggcttgcgatgatcgcttgcgcagcggtacgaagttcactgaatcacttgtctgtatcatgtatcgcaccaatcggcggaggtatctctatctccccaagctacaagatggcctcctatatgtagcctggccttagaaggtgctagtatggcaagtttgaacttctgtagttttgcctatcaagggttatacgtagagaagttttccacatttttctgctgtctatctataatacttaagaagggcaagaatatgcctatcaaaaaagatcaaaaggacacaaagaagacctcaatcgagccaactagatcatgtcgttcttaacgatagaggcaagcgcggtcgacgtgataattaactaggattttcacatatgagtaacagcccacatgtaattcagtactgcaggtcctagactgtaggtctacaggttccagggttagtgagcacattgcatagccctaactagtactccctactccgcagatgtcaagtaaataaaaagtggattcgtcgacaacgccattcgaaacccaaccgtcagccttacagcataggcacatgacttcccaaaagcgtaggaccaatcacgttacactacaaaggcccacatcccatctccataacgaaggacctgtaaaagagaaaaaaaataggtagcttctctttgattgagcgtgtcatccttagtgcaggggccatgctaatcttctctgtatattttcatttgaccatatgccccaaagggcgaagtatctatgcgttcagttcactataacctccatttgggggcagaacgttaccgcctacctgttttggtgtgtatcgggcgattaggcacgtggcttggcacgtggactttcccgaacgggaaactatgctccatagttagaggtggaagcttggatttgataaagagaaatcgggtgattagctagcaactgtcacatacagagtagtactatgtacaaaggccaatgatatgtttgagctacgtgttctaaatggttcctcattgacagacagcagacgaggggggagagttgattgacaatctatctaatgatcctacttgaaagagatgcaatgcaccgagtaatgacatagacagagacccaagtatcatatccagaaaccacaaccaatggcgccttgaaatttggaagtagtcaaaggagtcagacatgaacagaaggttataccaaaataaataccaaacgcagacacaatccaagctataacatcgggcgagagggcagaccgcagaacctcaaatagagatgagaaagtcgagttcgaaatcgcagttataatgatgaaaaaaggacccccatgtaaatcgtcccagtcttttttgtttctctgatggtatctcttggctaaattagatcaacatgcagggcgcggtagaagacacgatcggatttcaacacgccgaacaaccaacaagtcagaaagaagaaaataggtatcaacggtgatgcacgtccatgccgcgctgcagcgaggattccaagtcattagggttgtagccaccgccagcggtagcctcctgaggtctaggatcctcggtcttccaaggaccctgttggttatctggaatggggatgttagtctgctgagcgacctgctgctgctgggcggcgtgggcctgcgattgctggcggacggtcgcacggaagcggatgacctcgtcgagaatcatcttacgcatgtcgggaacttcctcgacgacctcgaagtggaagtcgaaggtcgtggggcagttcggctcgtcggaggcgtcgtgccagatatgcaggtaggggtgctcgagggcctcctcgacagagatacgagacgatggatcgaacgctagcatgcggtccaacaggtccaacgcatcggggttggcttgagggaacagctgcttgaaggccactttcggcatgaagggcaggttgcgcacgtattcctgggcgcggggcgatccaatgcgcgccagggtctcttcgttaggtgtacccaggtagtgcaagatctgattcagctggtcgacatagtcacggcccttgaagaagggtcggccgccgaggagctcggcgaggatgcagcccacggaccagacgtcaactgcacaagtggggttagcggggattcggtggcaaattatgcatgccggtgttacatactcgctttggtatagctctggaagctcagcatgatctccggtgcgcggtaccatctcgtcgcgacatattcagtcatgtatcccgcgttctcctccgggtcgattgagaacccacgggccaggccgaaatcacagatcttgagctcgcagtccgcattgaccagcagattaccgggtttgagatcacgatgcaggacgttggccgagtggatgtacttgagaccacagaggatctggtagatgaaggattggaagtgggcgtcagtcaaaggctggccggagcggatgatagcagccagatcacattccatcaattctgcaggcttatcagtccagctctattcgtcgcaaagcagcagaccacgtaccctcatagagatatgtttcgttgaagttgtccggtcggggaatatccatatcgtacaggcatgtaatctagagggctgagttagcgcgtacaggtaatgataaggatgatctgcggcctacattgcgatggccacggaaatgctgaagcagcttaatttcacggagggcgcgcttggccagaatcttcttgctgaagacattggtcaccttcttgacggcgacaccttcgccggtctggatgttggtagccgcgctgcattatgccatcagcacgtgtccaacgagtatcatccactggcatcaagacctaccacacgataccataggctccctggccaagctcctttgtcacattgtattgctcgctcacgataaagtcctggttgaagaccttgaagaccttgcgaccttgtaaatcagccatggtgggatgtcgcgtcggagagtcgtagagtgttagaaggaaggcaaggcgacgaaggaaaatggaattggcgagggtccaaggtgtcttcaaaaacaaaaagagagaagttgaaggggaaaaaaagggtgaagagtcgagagaagtgtgatgagtttcagccccgcagtccccgcgggtgatccgccacgcaaaagcgtttaagtccactatcgctctgaatgaatttgaagtttcaaagaagttctaaatttaattaggaccgaaagacctactgtggaagacttggaattcttgaatatccaaagattaattcatttcgccgtcgaaagagtgaaatagagtctattcctttgtataccgtctccatacagactacatatctgcgtcctcgaaagcaaatcgaacaaagacttggaaagcgtggctgaaacatgtctttgaacattttctatgacgtctctaaggttctacaggaaccagtctaaaccttttagggctacgaagaattcattcgaaagaaataggtgtattaaaggatatacacaaaggacgacagacatctcaggagagctttatccttttgcttgcagggagggaaaagttcaaccgttgctgtctcttgccagggaatagcgtcttcaatgtcgacgcctgccagtaaacccgcctgctggggggtttacagaggtcgacgaacagtctcgccagcaaggctaattgctgggcgtccaccagtgcgcggtggttacgccctgctagaggatgagtatctccgaagagcaaagcaaacaccaaaggtagcttgagaggaaatgtcctgcctttgaagcaggtacgaccaagcacccgcctcacgttggtgtggaactcttgaaggagcaagcagacattctcatctccggggagaacacagccaagaccttcttgccgcagccattgtcttaaatacgacaggtcgaaggaccatgacctccaagacaggaaaaagggttggttggagataccgactccttggggtttttcaacgacctgctttacacgaaggcggccatccgacgtaagatactttttgaccttctcttcatacgacatttgcaaatgagctagaggtacagggctcgacgaggaaggcgcgatgactccgtcactttatctggcgatacaattgagtactcctttcccttcgatatcagcgaggccaatttcgagcacctctttggaagtgaaaccaaattctaggtcgatattcaccaaataggaaggagggatattggactcgctgtcagattccatcctcctgatgaggttcaccattatttctgtctcgggacgccactgctgagaagacgctgtatcgaacaaagtcctaagctccttcattgcggcttcatcgtagacgaggagttctagcgtccagcaaagaaagtgttcacggcaaagtcttgagccctcccacgtaaggctgaagcacctcttatggcagcacaatgattgcttatcgcctgcctccagaaaattggatctcaaaaactcgttaaacacaaaccgcccattgcagggtcggcatttgagcccaatatgctttctttgatgatctttgtaaaaaaacacctgtttggaacgtgattctcgtgctatttgagcacggaataccaagcactaatccctcaacgacccttcccggccccgggcacttaaggccgaggtgaagaaggcattcagaccgagcagctaaattatgagaattagcaatgggatatgaggtagtaatatcttgtatgtcttactttttctgagtctgtcttggtctttttgcggatcgtccttctgcgtatctttcaacctcctggctgcccacttcgtggtcgcttcatgctcggaatcctcaacttagtcgtcggattcactttccaactcttcctcttctccgtcctcttcatcattatcaactttgtcgttcgcggcttcactctcacaatcttcgtctctgggttcattctcggcttcaagattcgcaccggggacctgtttttctcatgagtaatgctcatttgttctttcgttgttacataccttcaaaggtttgcattccccctcttgaaagtgtcctcgttgaacatgcttcttataatgggctgaggcggcaacctgtgtctgcttcctaccttgtatttgagaaaagcatcggtcgaactggcacagccacctgggcttgggataatgcttattcacatgttgttttgcatcgtagatcgatgggaacgtttcgtcacaaccgaatgtctcagcgtactcacggggccaacgagccctcatatggacggccaagtagtgcttttttaggttgaagtaggttaagtatgttgtgctgcaacctagctctgggcatatccacctgccatttctgtgggagctcgtcccaatcaagtatgatttttccatcgacatctctgaggggaatatgtggcgatgtcttgggccacgccggaataaatttcccatctggctcaaatttggtatgttttgtttgagcatgtgcttttgcattgccctgggaagaaaatactataaagcatttatcctcctgcgcacgtggacaaggaaactctttctctccctgatcaccatgagcgttcctcgcgtggcgttgggcattgtgcttgtctgtaaatttccaatcacaccatttttcgtcggccaggggacaaggccacatgggtttcccatgtacctcctccgcatgtcgagctgcacttggtctcgtggcaaatcttttttcacacttgatcctatttgcgcctgggaaggggaatcctttccctcctagggagcgtcgcgatctcttaccaccatgttttctcgcttcgtgctttttagccgcacctttgctacgaaacatctcggtacactccttctctttggccaagggacatggccatctgatacgatgatgttccctttcagaatggaagttcgcgttcccttccgatgagaaggttctatcacagttgagatcctttgcatgtggacaagggagccttggcctaattcccccactatggacaagctttgcgtgctttgttgccgtatctttggcaccaaattccatagtgcaggacgtttcctctgccaacggacaaggccatctcacttgctcttcgtcatgcttctcagcgtgcgcctgtgcatcatatttataagagaacttcttttgacaacgaagctcctctgcgcgcggacagcgccatttggcttgagcgtggacttttgcggcatggccatttgccctccgtttcgagtaaaaggtctcatcacattgaagttctcctgcgcgcggacatgggaagacttcgtgataaaggtttgccgagtgatcatctgcgctagcttgagagctgaacctcctgtggcaatgaagctcctctgcacgcggacatgggaagcccctgtcatgtaccttgacatgcttgctcgcgtacttctacttctttgatgcgaatattttgtcacatccgaactcttctgcgcgagggcatgggaagggcttctccttcattggtatgttgatgaaagtggttggtggtggtgttgaaggtgtagagacttcattaccctcaccattcatctcacccattttagaccttatatttatcatcatcctatttgatctgctctctctgctgaaggtaacgagacctccggatgatgccaatgaggtccaaaatgaatggatgagtggttgaggggtgaccacagcagagcgagcagtatgatattccctatgagatttaaaatggatagatgagcaagaaggaaatgaaaagagctggaaagaggtgagcaataagagaggggatgaagagagaaaggtgattaacaaacacttcattaacaaacaggccataagcaaaccgccatacgcaaatactgcggtagcccgcatcctcactttaacagaagggtgtagtgacctaagcaatatacaagttaccgagtccgtcataaaatcggacttatgattttatgatttgagtatgcctttgaaaccgcctttcggttggctcttttaagttgtctttatggctgtcttttttggtgttttattcgtgcctagacctcggaatttcccatgggaagatccaatttggccgcctaattctagtggccaactagagggcatcccctcaaacgatgagctagctgctcgggctactctcgcggtcaaggcttcgcgcagctaggtgggagaacgctcgccaagtaacacaacactacaggctattttaaagcgctacccatgggggcagagatgagtagtcaagataataatattaattaatgatggctgagagggagagaaccaactacgcaatgggaaatatggctgtctcagacgtagcacatgcatagtgtcaacaaaagatgctattttgacacataggataaaatacgcaaacatatcttaaagcttgatttccttttatgggttcaatctacaaagtctctgctatatgaagttattgggttttgataaagacagaaattagggctaagaatgatacggctgagtatagggaccagaagggtagaaatttcagagagctaacgacggtacatactcagtacgcttcggccttttctgataggggctaagattcgaatagactgtcgaccagaaaggactcctgtaatatcgttaatatccctggtgttgtagtattagttgtatttacgcataaacacaattatactcattttagtttttagaccaggatcttttcggcagaaaaatgagctccctttgttcaacataggcttccctatatttagagtcaaggaatatcggtctatcaagtgtgtttcagaccctaattactctactacattaggtatgtatggaatattcaggagaatcagtagaatatccgcatgttcttcatttcacttttcacttttcgtaaatcagtaacgaatatgtcccctacagagtgttctccaaccgacgctccttgcgcagtgctcggagcttgacccgcgcctcctccagagggaccatgatgcccttgttttgggtcgcaggatcatcacggttgcgaatgttgacagtgcgtgcctccctctcctgggcacctacaacaaagataaagttgtactgggccagctggccagtacggatcttcttctgcagcgtgtttccactgatgtccacgtccacatttaacttgtcgccctgcagaatacgctgcagctcctgggcgtaatcattcaaatccggcatcaccggcacaataaggacctggcgcggactgatccagaacggccacttgccaccaaagtgctcgatcaagatacccaggaatctctcgaagctaccaataatagcacggtgaatgacaacagggcgggcgcggccgggggggagatcgttggactcgccctccttcgcgctctcctcggggttcttctcccggttttcgttggtctgatactcaagcttgaaattcagcggagcctgatagtccagctggatggttgcgcattggaattcacgcttgagagcatccgcaatggtgatatcgatcttgggtccgtagaaggcaccgtcaccctcgttaatggtccaatcgttacccttaaacttggttaaggccttcttgagctggtcctcggcctggtcccaggtctccaacgaacccatatacttctcggggcgggtagaaagcttcaacttgaaggtaaagccaaacagaccataaatggactgcaagaaatcgaacagaccctcgacctcggacgaaatctggtcacgtgcgcaaatcacgtgactgtcgtcttgactgaatttgcggactcgggttaatccgcttagggccccggatgcttcatttcggtgcaggacaccgaagtctgcaatacgcataggaagctctcggtagctgcgttcacggtgaccgaacagaatgaagtgtccagggcagttcatcggcttaagagcccactcgcgtttctccacatccaacttgaacatatcatccttgtagtgctcccagtgtccggaggtcttccagataccaacgtcgtacatgttgggggtctggacctcctggtagcctcgcttgcggtattcagaacgcaggagagactggatctgattgagaatcttggttccgttggggaggagaaatgggcagccgggggacacctcatcgaagaagaacagctcttgctccttgcctattttcaagtggttccgcttctcggcttcttccaagaacttcaagtgctcagccatttgcttcttgtcggggaaggcaacaccacgaatacgctgcaaagagtcgttggactggtcaccaaggaagtaggccgatgagttctagaattaaaagttaatgtgtctcttactcagtcaaggggtcgaacagtcacgcttacctgcatgatcttgaaggccttgattttaccggtgttctgaatgtgagggcctcggcagagatcgacaagggtaccgcaacggtagacggtgctgctttcaccggtgacgagcttgtcaatatagtgcagcttgtatttgctgtaggcgaacatcttcttgagattctccttagaaacctccaatcggtcgaagctttgcttctccttgaagatgcgcgacgccttattgtcaagcgccttccagtcagcctcgcggacaacacgtctgttttgccatgtagattagcattggcgcagttgtgaatggtaggtgataagataacatacccatcaggcatggccatgtcatagaagaaaccctgaggggtagggggaccgtgggaaagaagacatccatattcgcattcacatgcctcacccagagtatgagcactggagtgccagaatacatcacgggcctcggggtcgctgaaaggcacaagaagcacactgcagtccctctctagaggccggttcaaatcccacaattctccatcaaccttggaaataacgatattggcgctgatatccttgggcacatcgcgcaggaatgatccaggggtggtctcgaaggccttagcagggactgaggagggggggttgccgtcgccaatgtcaagggtaacgttgatctctgggtggggacgagtcttggtctcctcgaggtattgttgccaaagttcttcgaagagcttgtttcgctcaagcatgacttctgggagagtatcggggctcggagcctgcttgggtttcgctttcgcatcttttggaggggcagccgcagcttcagaggcgttgttggcctgcgcttcagcggcaggccgtacggggatatccttgggggtttcggatgccatttttgaaacccttggagcaatagcgcaagggaactagactgtgagcaagagcaagaagtctaatcgcggcgtggaggggaaaatgactctttgtgagggcggtgaaagataagtctcgaagtcacgtgatggtactgcccttagccgacactttaccgcttcaagtttccaccaagcgaaaacttctccagctttgtacaagtcaatcacctttatcaccacaaaatgtctttccgtggtcgaggtaacgcttctggtgccaaccggggaggtttcggtggtggccgtggtggtgagaattttccaacctgaatgcgatgcgagaagttaaaaggagctaacgaaatttttttgttgcaggtcgcggaggcttccaacagtcattcggccccccagcccaggttctgggtaattattcttctgaacctgactgtaattgattcatgtcgctgatatgccgatagagttgggttccgtgctgcactcttgcgagggtgagatggtctgcgaatcggtcaaccccaagattccttacttcaacgctcctatctacctggagaacaaggtacgccatgactgccgcaaaccattacaatttacaagtccatgacctaactgggttatagactcaaatcggaaaggtcgacgaaattctcggtcccattaaccaggtctacttcaccgtcaagccccaagatgggattgtcgccacctctttcaaggctggtgacaaggtctacattggtggagacaagctgcttcctctcgagaagtacgattcgctgttctactcattcttatatactctgactaactcacctcttaggttcctccccaagcccaagcctcccccaggagctgctaagcccaagcgcgccggtggtggtgctccccgtggccgtggtggattcggcgccccccgtggtcgcggtggattcggtgcccgtggcggtgctcctcgtggccgtggtggcttcggtggtggtcgcggtggtggtttcggtggtagcggtggtttctcccgcggcggcggcggcggtggcttctcacgtggtcgcggtgcccctcgtggtggcggtggcttccgcggtcgcggctactgatcgatccaatgtactgtctctttttggcgttttgggggatctgggagctttttcaggaatatctttccgtcttcttgtgcatcctgcgcaattgcaacttcactggctgcaggctgtagaatatcaccagtcaaaaatgtttctgttatttttcattggattttccagaacttgcaattaaaccataagacattcgtttagagattcggggatgatcggctggacatttggttgggatgtggctagcagatgtggcgcagctgcaccgcccctgcctgcctgcagtttgaaatgacgttgaccgctcagcgaatctgtgcgtctgtcaacactcccaagcaggattgacgacatttttattcttcttacccaatctcgccctttagacattttattgagacagagtatccttttgccgtaaaaattttcgaatctgatatccatttgagcatgtctcgtcggacatcgaccatggcatcgagcaattcttccagcggtgtcccaccttcaggcgatggaggtgtgtttgagctccctctgatcgtgcattggcaatatagctgacatttttcaggtcaggagaaacagaaaatgctactttcctcggatcatggtcatttcagcctggtgaagtcagtctcgtgcttcccgcgctcctttgccctcggttcagtctaacactcaacagggccatgcatcttgctgatctgattactgaaatgaatggtaagagatcgcaagatcttcagactttgtttgaattgactcgctaactctatcttaggtttctgtggaggcaagctcatgttccccaaccgtttttccaacccgcgactaatatgttgagcagtcatgtcggtattctcctccatgcgctactgcctcggagacccaactgaatacggttccatctgggctgccctcgcattcatgcctttcggtttgttcttcgactttatggatggcaaagtcgcaaggtggcgcaagaagtcgtctctcatgggacaagaactcgactcgctagctgacttggtaatggatccccgcgaataaccacaagcgagtttttgctaacacccttactccactagatctccttcggtctcgctcccgccgctgccgcattcgctcttggtatccggacctcgcttgatcatgtcttcctcacattcttcgttctctgcggtctgacccgcctcgctcggttcaacgtgactgttgccgtactgcccaaggatcaaagcggtaaatccaagtacttcgaaggcacgcccatcccaaccactctttcaatcgcctctgttatggcctactgggtctctcaaagctggacgcacgagaacattcctcttggacttgtcgcagagggtaccatcttcgaattccaccccgttgtcttgatgttcgttctgcatggatgtatgatggtcagcaagacgatacacattcctaagccatgagctcaacccatacttggccgcgcatttactgttggaaaaaaaatgcctgagtctgttgtctctctcaacttggacaactgaaaataaatatcgagaggggtttcgtttgtaggcaaggcatagcatgatctcgatgcacttaaatatggatgcttaattgaatttcaattgcatagattggctatagtcattgtggtttctgcgtagggtggtcaaggtcaacatattgaagacgtagctttcggcaacagcgcaacccttgtaagcaagtgagccatggattctctgtcaaatttaacagcgcgcaatgcacaagcaatgctgaccactttcataattccatggtcagtacacgctgagaaatcttaaaatgaggtagggacaagatagaaatatcaatatgtaaactgacactttccctggagggtacgccttctgtgtgtgtggagatatatccactgttcatcatagatattgtatagacatccacgcaatgttgacctatagagatcgtcataatgaccactcgactaggtatctctacagtccgttcaacgaagacttcaatacgacaacaaatcatctctgaacacagcaagctgtagtgaaggcatgtatacatcctccctattaccagctcgtagatcgcattgcatctaatccaaacactatagcgaaccaagcctaccaccaccacccgtggacaactccaacgatgaccatcaccagactgagcccccccaggtgcccccaatgctacagagatggcataatacggatcgtcaacggcaacatcccgaatggcaatgcaggtcgtccatattatatatgttacccatgtgatcaattcatctgcttcgctgatgcacgcgggataggtcccgctaacccgctctgccaatgcggcgagtacactcgtaggcagatgtcgggggcgccgcatgggattcattatgtttgtgctcggggatggtgttggttctacgagaaggagatggagatggatgctgtccagcgacaggttcctgccaggtcggtggagatatgtgcgaattactcttatatctgagatttgaggtttggtttgggtttgggtttgggtttgaggatgttattgtgtttgttcttcttttaaggtggtttgatttccgcttgtcgtgattttagttttaatgctgaagcctgaattaagtacccaactggttatgtctcttctccgtaagcaaaacgatactctctcttccgaggaaagcattgagccggcccatccgcatgctctagaacatggcagctagcatcatcgaaggtcacaggcgaagtcggaattttaggatttaaaattagaatagcgttgacacttgctaggcatacagggaggcacacagggtctagacccacagtttcactttgatatctgaattcgaattttcattacccacctagggttcgatctagacggccaaatacatacgaaagattcaagcaaatcaaatagagtcgtttatctttcaatttatattctctcgtggaccggtaagagaattcgtttctacatgatccctttgacaggtggagaatccgactggtctagtggacgccactggtcccggaatatctcagtgtggtccagccggtatttccgtcgataaggtctaggcatgtgtgcttgttgacatcttactgtagagtacggagtatgcagtacagacctgtattgcctgtgtatgctacgtttttggaggctcttggctaggatgtcgggtcagacccgatcatgagcaatatgtctcactgttggaagatcgctcatccattgagcttttattgcttattgtttgctttgtgggctatagagttagacgtgggcgcctttagaaggggaaagaagggaattgtgtcgaggacatgagttggctataattatcaatcgtgggcaacgagacgctaagttacctgcgcaggcaattctgttgaccgttgaggagtttgattcccacatagatcacgaggttatctggcagttgcaataataatagaatctctgactcagaataggcaagggactagatctgcaaggtacagccgatatattacacacactcgatctagagcgcatttggccactagtaactttatctctctgttcagtaaaggtcttgtataattctcgcatgatggtaatgtggttgggttaataacctccggtatctcagggtttgttatgagaatatgtagacaatgctatgcagtcaagtcaggaacaaaatacttgaagcaaataaacctcgagaaatacaacatatcatacaatatacaagacaaaagttcaagatcgaacccaaccctaatacatgccatttatagaccatcatacaaaggtagatcttgagccgcagccctattttacgagtcaaattatgcggttttttgttacaggaacggtacggcgtattaccgtagggacagatcataatttggtatactccacccgggagtggccgcgcattacccatggaaactatttggatacgtggaaaagggggcatgaacaaggatatagaagaaatcgattgagtacggagttcttgcgattacatgaagtataaggctaaattccaattgctaaatccttcatgtttcatgttgtatggagtatggagtacggagtaacgaaggttattatcccttgtacggagtattcaaattaactccgcctaggaaatgagccctgaaatctctttcaacagcaaactctgcaatctatcaaatggagatctaaatttaccctggacaccagccaaggatacaattgtcagccacaaaggaccgtggcgtatggtaaccggtcatttaaagcgaaaacacaacagagacggatcaaaagcatcgttagccgaggggtgcgttgtacaattttgaggggtaaaacactccgtcgtcatcaagggtcttcttcatgtggcgaaggatgcaggtaactctgtaaagtacggagaaatacggtacatactctgtacgtgcatacataatattgattatccgtcgaggttcacacaatgagggtctcataatcaccgcttggcacccgaagaagactagcggcatgtccaaggactccatccagctcccgtgtctgacccaaataggaaaatgatcaaccacagtcccctggcttaccggggcaggtgcctgattacctaaatatatgtcgacgtctcattggtgggattgtttgtttgtctactttgtacctggtattgtaccatacaaggagcaaacaaccttgaaacgacccgcgaaactggtgggctgaaagtattcggtactcgggtacaccagggttagcctcctatgttccaagtacctggtacataatgtcacttctccggggaacacagaccccttaacagtccctttctcaagggatccattatccgtcacttcgccctcctgatcttcctcccctttgcacacattcgttactcgatttcttcgctcgtttactccctttattcgagggttatcaactgaattgctttttacttcacggtcgctcactctctcccgacttgtagggggtgatcctctactcgacaacgtactccaggtaccaatcaacacaacgcgaaatcaccttcttttcactctttttccgaccgtcaaagttcgactttcgaccatacgccctgaggatctgaccgaataattcaggcccaacgtggtagacacttttgagaacaaacgacgtctactggcatacattcaaacagaagttcttgagggttacgcaggccgttcccagtccttcatcaatcacccctgcgactgtgtccagcggtgcttattctcttcgttgatttcgatactcgaattcactactctcccaacacatcatgcttttcaacactcatggcgccctcgtggtgtccggtgtggtgatggcagccgccgcggcagttccagaagacttcaaggtggtccgtcgtgcgccgttagggacacttcaaggttgttactctagcattcctggatatggaaagtcaacaggctggacataccaaagttccgggtggtgtctggaccactgcgccaaagactacgcgacattcgctttgacaggaggctcagactgtgtgtgtggtaatacgatgcccccagacagtgccaaagtttcaagcgacaaatgcaacaaatcctgcagtggctggcctgatgatatgtgtatgtctatgcccctccttcatcggtctcaaagaattgacttgctaacgaaattctataggcggtggtaccggctactactctgtctataccaccaatttggaagacgacgttcccacgtactctgaatccgggtccacgaccaccacatcaagcacgagctcgagcagtaccagcagcaaaacgacgacgcaaaccgatgggtctacaactgctcccactactagtagtagtattagtgaagttaccgaaaccgccacatctgagcctaccacgagcggtctctctgaagaggatatcaatgaacagtcctccaagggcaagaatactgccgcgattgcggccggagtcgtaatcggagtggtcggattcgctgctctctgtggtgctgtcttcttctggtggcgatccaagaagaacagggtcggtgctgtgggtggggttcctggcggctatggccgtgactctggcccgccctcgatgtccgattctcgcttcgatggcgactacatggctcagcgccgccaaagcaatggcagcatcgatgatgaccatgacttctctcgtcggatcttgcaggtacacacgtacaacgcctaaaagcattgtttcgaagctgacttgtgtcacaggtgacaaaccctgatcgttaaaccaatacccatttccgaaccattcatgctcccccccctttattctttctacttggtattagcgaaacccaatgtcatttctatctcggtcgcactactttatgagagcttcttatcctgttgtcattgtttttttgtcgggttattcagcggagttatgatatccgaacggcatatggcttgatccgagtcgtccccagctggtgacctgtgtctgagtttcttttaccaatccgttccatgactgctccatagacaacgttgccctacctgtccagcacctcttattgtctacattgggaaaacaaccgcaccatcggccttctctgccgaagacccggtcattgtatcttgttcaatcaaggtgaagtctctgatatagagacgagttcgaaaaggcgtttcattttatttcaacttgaatgctcgacttttttttttctttttatgagcaaaccattcctttatgtgactctttttttttacttttttttccccatgtggtctcttttcctatttccagtcagatctttgcccgtcggtcctataatgagcttctcgcgttctgcaattcgctccggtctgatctgattcaaggataggtggctgtagataggcgagaccattcagctgtacttaatgtgagaatcgatatgcacatcagtctacggtcatttgcttgtaaactagaactaaagtgatttcaattggtcgaagctgggtttgccgttagttcatatgtatgtcttggatatatctgagtgttttagtgtttattcaatcagtatatttgcattgatcatcttttaatgtctcaactggttcacttcctatgggcctagcgatcctagttcgtaaattgatataatcaggtcctaagtcaactatatattgtgacatcaccttcaacccggaaggtttatcgccttggattaagtcatgcgcctcactttagacttagattctaagaggcaatgaataatgagaactcattacaaagtacaagagaccgaggcagaactccaaatttattcagtatgggagctcaatatcaaatagatcccccaaaatgcatgtaccaccgcacatcgcaaaccatcatcgaaagcctcaacggaggcaacggctcacgaagatcacctgaagagaaaatgagaaaagatcgagacaaaaaactacacccttacttacagcagaggaatagccaaaggaaatgccgccatcatgtccttgtaccagcgagcgatgttgggatcgctgtggtcatacttctcccgaatcagcgcctcgatggtttgcttgagcgcgaggacttcgatgtaccaaggcagggcaaactgggtctcgagacggaggtactggcgagccgcatgctcgaattggacgagcttcggatgcggcgtgccatcgctccggagaccaagcgaagacggagcctggaaagacgcatgctggtgggtacaatattgagtgtatgccgccatatctgcctaaacccctcgaaatgtaagtggatattgtacgaaaagagcgatgaaacttacggcatctccaccatgccggcccgcgaggctgtgggccttgccgtgggatttgatcagacaatcgagagccgagcagaggtctcgaaccgcccctgcaacggcgttgacaatctcgatgtcgtgtactaagcccacatcctcgcctttgccaatcccggattcctcgttgatccagatctcctggacccattccagcaatgcctgaagttcgaacccgtggccccggatgccttcgtaaggctagaaagaagtattctagatgagtacatacacgactgaatgacaagagatcctcaaagaatacccacaagttcacacctatggcgggcatggcagcatctttggcaacgcttcgaggtgactggatcgcgaatgcagttcaccttgaagggttgaccccacttcgtctcgtcccaggcacgcagtgataccctgaagcagtggatacaccaccccgtctctgcgggaaaagggtattcgagaagttgcgggtcaaaacccagactcgctagtgtttcagcaggtgttttcggaagcatgatgaagaaatgtctttaatggagaaaaaatgacattgaagcaggatgcagaggtgaagaagagaagacaggaaagtgaaagaatgaaaagatcagtctcgaggtaaacaaaccttgaaaggtaaacaaagcaaacacattagatgagtctgatattcctttgatgttttcttggaaggagcaaacgagaaagaaacgctccttccttttccttccatcctaaatgaggttattcgatcaccgctcttgcctagaaatgtctgggcatagaacagtccagttcagtctgtttttggaccgaaccatacagctgagataagaggaaaccctctagctacccttcgctaatgcctacaaaccatctctcacttccccatgatatcaggaaagagatacacacagacctcaagccacataggctataactgccagctggctagccccaacaatagccaacaacctagtccataacacagcctcgcccccaacttactcgttgagatccatggtcccagtaggccaacgccggacccaacagcggctgacagccacatggcttcatgcgacgctaatctagcgacgaactagatatgcaggagagagaaaagagaccgaaggattccagtcatgctggtctcgttggtagactgtggcagctgataaatcgagcgtgttggcgagttagcctttgcccaacgaaggatggagtatttcccgttggggctgaaaattagccgctcaagatattggacgcagactaggctgaaaagagtaggacactaatcgaatgagctgtttttgatctagttgacatgcatcaaagcctgagattgccactactctttgccaacttccctcctcggtacagtcctccgtgcatggtcacatatttctgctcctacctcatgtcagatatttctacatatgcggaggtgccgtagattatacagactcgaacaggcgcggatcaatatgaaatataaatatacaccgtatactgcatcttaaaaaggtccactccatacaacatagagggcaatcatagcacgctagccattcctattctcagcccgcttcaatcggacaattatacagtcaccccaagactgcaggacaattagccaatcaaaattgcagcaaaaccaacagcgtcaccaagcatgactagcagatgcacgctggcgccctgaacaccgggtgcgcatgatgtcatgcaggtagtgtctatggctatgcaaagctagactcgagcgcatctagacagggtaatatgaccccgattggcttaaggcttgttgttggttgttagtagttccagaatagcaattcctccgcgaactataaaaagacggtgtattgttccctaattagctttgtgaggtggtatcctagcagccatgctagttgctagtctaggtacttgcatgttgggaagactaaaacggtatagtattgcgcttagtgtgatgctctctaagcaacctagttacccaagcaagccaaattaactacccagtgggagtactcacccgttgagtgatctgcaaaggcccacagcttttggccatgtggtatcgacggaagagagcgggaatcagccccgttcgcatatcggaaattgtgactctccgtgcggagtatagcgaaagaaccgtatagggaaatgagaaaaggggtaatcgggagaatcgagatggacaatatatattgtagatctatttgacccatactaagcactgtaatgtcggagtaactagataaatgcatctcaaggtctttttttcagggttagctcgttcaaacccctttgttgtgcaggtcggcgtttgctttcggcttagagttacattttctatctatctatctacaacatggcaattacaggtactactccataactgggagatgaaagtaccgacatattactagattacaaaagtacctggtagtattttgcgttaattcgctagcatagacggataatttaaccatcaccgagccgatatattatgtactctgtacggcgtgtgatagtgtagtcaactagctaatggttagttaatggttctaaacaagaatatatattatatcattgcttcgcttcgctccgcaacaaaatatgcgcacgagcactttctctaaccactgacatgtttgtccacggacacggtaacgggaacgcagatgaaacagacacagtcgcctattcctgttctagttaacagtccagtacaaattatctggaattagctagtggctatcatctcatgcacacgctgcagtagtgctgcagtagtgcctgcatggttacgtgccctaaattagctcgcatttcttttccttttccagccacatgggctacggctcggccgtacgggtactgagtacaaagtactatgcatttatatttgatttgctcgaatcaaaagagattgttttcttttttttaaaaggaagagtaaaaccaataatttattgaaataaactcatatcgctatacataatttcccgagagattccacctgcatgaagtatgtatggggatcataatggcagtgctatgccattatattatattaaataaccccaaaagaacgatcattaccagatataggcattggtggtcaggcactcgaaactcgaaatctgcctcgcaagcatggccacatggcatggtctgatcgacgggtctatctgaaacgggatcgaaatggcccaggacctgcaggggcatgccattagcgcaggcttgcaaaggtgtaaatgtcgaaaaagcaatgctatgccgaagctcctatgaaaggagaaaatgagtatttattctaattcttccgacttcggtaaaccgttgctccacttagagtccagactcgacgctcttcctttttttagtatgttagagaattgctacgatcggagcccttgtggggaaataccccagaaacaggaaatttacgtagattccttgatgacgatgtatagaatgtcagtaactatagcatcctggcaacactaggcgtggcagatctcgggacatgaataaggggattgtcgagcgtgcaggtgacgagtcatgttctcgtcatctcttcggttaatccctgaatgatccctgcaagtgtgctgtatgcggtatggctcgttttggtcaagacaggggaacccgcttggaagacaaattgcctcactaacgatcgccagtgacgatggagcaaaaaacattgatagatagcgacgatctgctggacaggactggaccgtgcagatcgatcacactttttctggcctacgaagtccatattgagacccgctgcattggcgataatcgcgatcattattgtggagctattgaccagcacctggcagagagaaaactcgattcaccaacgtgaacagcaacagaagatcgagatcatagggataatggcgatgctagtgggggtaatcgtatagccgagtggacctgacctaaccggattcacataatgcacatccgcgcttacaatcgaattctagcatttggtgccccttccacgtgggcgcagtcaatcaccagaccctagcaggtatcggaatctacggagtttgaaggggtaaccttgctacataactctaagaggaaagctcgggtatagccgatgtctcctatctctttcggccaatcccaagcgagggaggtccaggtagttcaaccgggacatcgggaatagccgtacaacatacggagtaattccgacggtaaacagtaacttcggctatttatcccggaacagggggacggaggacggagacggagtatagcaaatgtcctgcgctgattcgaacccgatgcacccgggttacagggccactttcttgcgagttattaagtcacaatataactacagagcgtttagggaccgccaagactcggagcggttcgatcaaacgaatcagaaataatagcacttctaccaatcagaaaaataccctagatctgaggtgagattcgtcttccatggaatactccatgatgcctatgatgtacataactgactagttagttagcacgtccctcttatatcattgtacaagccttatccgtaacattgccacttcgctccttcaatgcttaaccatcctgagaatcgtgcgatccaccattacgggaggttaaaaggggagcttcagattcaccgattaacatgctactctcggtcccggaagggccacctcttggccaaagtgagctgattgaaattaaagagcctcgaaagcttagggggccgagtggggacgcatacacgctgctatattccgagtccaaatcggtcatttctcatctcccttctgtccagatcgaagtcgtccaaatgaaatattaacttttcaagggacgtactctaacttgggtgcgcccatatcgattcaaaggctctcaacatgggcgcacgttgcggatacatactctaatttaatctaatacacttcgaattgtgccacagtgtgaattgctactccatacttcgtacccgcaaattagtttcgggtgctattttgtcgatcaggaacgaatgagggagggcgtaatacgtataactatgcactccatacacagttatcaagtggctgtgtttatatctctaccacaacggtagtataagaatacgaagtatgaaaaggtactccgtagactagcgtgcatggcctggcgtaggtcccgcgtggacggagtaagcatctaaaaaaagaaccaacatcaaaccgacctctctgactggctcgtttcacaaagtatagtcacatagtcaattgtatgttgcatgcctttcttcgtgttctgcatggcagccggtactattgtaagcaaggcttattcagagtaatcttcatgttcaagaaaaaaatggctattcatagattttagatacctagatcttccgaagactggcagctcatgcgaatactatcaatgcagcatcatcccacctgggcatacataccccatattatctaaatccctcaaatgtggctgttgacatcatctaaacgacaatggccgacgatcccaacagcgctacgaaagaataagcgctgttagatttttacatacaaaggtgagttggcgacaccatcctaagatttgaagcctccatgatctacacagacgctaacagccacgagccatgggaaattgcaagcacagcggaaaatagcgcgaaacagatcgcaagcatagaattaattccctcttaaaaagaccgattggtccataattgcacacttccatattaataccgggtccctctacaccaaaaacggcctagatcaagattatgcacaacaaggctgtgagcgcaactaagtaacgacgatcgctagggcccaaaaaaggaaaagaaaaaaagtccaattacacaaaaccccaggctaagcccgctttctggccctagccgcagcagccgaccaaacatggccaagacccactcttggctacagtgggagcatgttgtatagggcagggcacgaaggagaggcagggatgcatcatgcgtgtctaaacttggaacctgggaaaaattaaacgagaggctgtggtatagttcccgcatgctgcatatgtgcctcgttctggtttgggtccgtctatatccagttatggaactcgtttcaagatccctgtaaaactgccttgcgatcatgattctcatcgtggatcctggtaatccgtgatctgcaacaatgtacggtggatcgtgcgagaagaacttctatatttctctccacagttacctagtgcccgtgatctgtctgatcggtccgtataacataggtagatggtggtatatactagtgacgggcgtcagcacgggacgtattttagcctggaatgatccttcgaggattcctgcataatgtgcactcccgctcgttattttagtctattgttccttgtttttagggatgtgcttggcggaaaggatcttggaaatttagagaagcagggatagttagaggtagcgtgttttaatgtatattcagaattaaatttgctatagatagcgtattaagttcctgatgcttgccctgccacgagggtgacaggggacctattctccggtcctgcatgcggtggcgtgcagggtaacttagtcccggtgttgggtccccgggacaaagatggtgtgtatgaggattcatatccttatactccggatgtaaatcaatacgaccttgacaatatggtgggaagcaaatagttccccacgaaccctgacgttttgaaatcggagcccggagttctaaggtatccgtcccctcccccaagagtcaaggatcggcgcgctgaaacaaaagcgcaaaccttggaaacgaccaaatgccaagacccagccaaggtccccggggccctctttctttttcttttctttttttcttttgccctttcccttttgggtctagtggatccggtctagttcggttcaactgacctcaagtttggttgaggctttggtcgaatccatggatccaccgctcccgttctggttgaggtcatatctgacatttgaaaaagtacctcttcgctgtatatcgtggagcgacaaaagattaagagtatcaaagtcttattttctataattggactgtattcctaattcagaatatcccccgctagtccagtcgatatcgatccagccctgtcccgagcctcttacacccccttttcggaatagcgcgaattctgggtctgcgagttgcccgaatcagcgcacgccccactgatatttatgtcccttagcttggatggagcaaacccgttacattccgtggaagcttggactcgcagcctcgggtcctccacgttgacaggatttggaatatcagagccattttagcggctttcatacatgggatgatttgaaatcattgagcttattctagctattcatgaatggatacggagtactccgtattactttaatcctaaacgctaattcacggtacttccattgacggtagccaaattgcgcatctctagcacagccatattccaatttcttattatcaaagggcggttgcaaagcctcagccgcactcaggttcttatgcaatgctgtgtaaatttagtacgcttatgctctgatcatcccgcagagcgatcatcgcctccacgcccgtgctgtttccctggatctaatctcagttagccctagttgccttagttcgccttagttcgccttagttcttatgttggatttattttggttggaattattattagcttggatattgcgattaattgtttttattttattgtttttttattttggatattaatttccaattcgctcaaagtttattaatcctcgtagatcgtaggaacagtgtatatcagtccactctcttctcttcctcgtctcttctcttctttcaatattctctgcgtcttacatctcatccataccagcctcatatctatcctatcattcccctttcatacttacccactccacttacattctattctccaacacatcatggctcggaaatctacagggcgcatcagtccaaagcacatcgtctctgtcttgaactcgcctgccgtttcctcctcttcgccagaaccccgtcaactagcggcttccaacgtggtgcgccggaagaagaacattcgtccaaacttggcagatgcgactattcctgtaacctatacaccaaccacccatcgcatcagcaaggccaagaagggaaaacgtgtacatgcctgccaatacccagcatgcggaaaggtcagcacaatcatcttcacctatcaaacatcaaactgactccattgcaggtcttcaccagggcagagcaccgaagacgccatgagttgaaccacaaccccgaggcatcgtaccgctgcgcaacagaaggatgcaacaaggcatttcaccgcgctgatctgcttgtgcgccacatggagagacagtgagtaccttgggaattggctacatggcgcatactaacaaccatggcagtgaactcgaatcgaaatcagaaaagtcctcattggcacccaaccccatcaccgagtcccctgtctcgccctgtatgtcaatggaccacggaattccattggctgcaacctcccattcacactccatgtccatcggcgcactcgtggctcctggcatccatccggatcttgccaacaacgactgctcattactgtggagcggcatcgaattgcccctacagccccgcccggctttccacagccagctgcccgagtctgtcgacgacagcccgttctattcttcccccgcagagacctgcccctcgcctctgtcggatgcgactttttctcttcctccatactcgagctcctccatctcttccgctgggtctgtcatcgaccagtacccgagcaatatcgtgaagagcgagctcacttcgtccccgcttcagatgcacactccgctccgttggagtactgagggtggcatgcctccgtcggacctggtccccatgtctatgggggagaacatgatccagcctgttcagtgccactatccctctccttcgtggtccagcgcagactgccttccatacgatgaccaggtccattccatgcaccagttccagccggtgagctgggccatgtgaaaagatcgaagctatttggtcaaacattgactgtagatggctgaatatctgacgactacacgaccaccgcatttcccttcatacgaaaccggcacgatccagccccagaaaaccttgaactccatgacaaagacaacaggtgtgggtccaaggaacgggaggcccggtgtggtctcgactccctacaaatggctcaaccgtcattagcagggctctccactgactccattgttgcccggaatgtgaccgcctggaggatcgcctggacttcgggtccgtcggtcaccgccgcttacaccacgcggccacaaaataaaagcccaaagaagataagctaatttgccgatatcggctggttaattccttagtctggcgtccagagacaaactgggcattagactggaagttttttctcttctttgtttaacgttttccttatgtgagatttccgacgacatgatcatgattgcttgtttttcttttctcatttgtctacctaactactacaccattatacccctacaggccattcaatgtacctcgaaactcgttccaagctgatcttcatactcctacaaaagtaaagctcaaattcaacaaaataataaccccgatataaagttcaactctattaaacaaccacccatggttcggccggccgtcacaaaacccgtaaaacgcaagcgagataagcgatctccgatcggagcggaaatatcttccacagagtcgaagccgtcgggataaactccgcttatgtaagggcggaaccggaacaaagcgaccctcccccttccttccttcattcacctggggcaacgcaatgacaaggcaacctgagagactcggagcttccaaccactcaaattccttctcggccgtaagttggacagcgtacattatctccgggtagccttgggccctaccttacaacgaattgtagcttacccttcggacgaaaagacttggctacctccacctttagtcccgcaatacccgcaacacccagcctattctcaatgaggtatacggacctcttcgcgctagacttgttctgggttgaggggggaatatcgttatttggatgggcggggggtggccgcttatatttgtaatcttttttagttatcttgagagttagttaactagttagttaactatgtattgtgggtttttggatgagatctggatggtcttgaggtggggagttgagggttggttttcgactgatttataactacggagtacggaatacggaatacggagtacttatattgactatctaatgtattgattggccttgtatccattgtctcttgtcatgttgtatacattcttcatgtacttttctccccgatggagtgagtaagtgagtgagcgagtgcttcgtacggagtacactactctccgctccgtaggtactccggataacggagtagaggaactagagctctcgactcggctgtggggcatgttaggctggcgtgtcgatcaggggttctcgggggtgtcacgcggcttttcgaggccggggctttcgttcagacctgcctgcttgagtggtggtgtggatttgctatttgtttggattcttggattcggtgtgttgggcatgattgttgtggggtgtgaagtggtcttgtggtggattgctgtatgctgacgcagttgtacattgggaggggagtgatggctgcttatactgtagggacaaagattgcatcgggcttatagttgtgggccagaagcaatttttgactcgtgttgtagtcatctttatctgaaagtagacagaaggctgcatattcattggtgtagtcctatgaggacgttccaaggaacagaaacaaagagaaagtaaaaagcaggacttcttgatagctgattactttgaccatgtacgatacatagtatgcaaataaatttgatccatcattctcaacgattccctacaacatagggaacgccatcccatcgcctcgaggatcactgcccgcagcataaaccagcttcccatcatcatagtacgaacggatgatctggccgcgaccaaacatagcccgcttccaacctttcaaaacctcaatcttgtgaccaagacgacgcagtccctccacggcagcatcactaataccctcctcaacccagatcgtgcggtcagtactctcctcattcggtgcagcaatacagaagcgcggggaatcaagcgctgcctggggatgatacccgaaggcaagcatgttgagcataacctgcacatggccctgcggctgcataaagccacccatgacaccataaacggaatgtaaggagccatcggcgatattagtgataagggcagggatgatagtgtgatatggccgcttgcgcggagctaggacattagggtggccttcctgcagcgaaaaattggcaccacggttctgcagcgtgaagccacagccagcagggataatggccgttccgaacccggcatagttactgttgatgaaagagatgccgttgccttcgcggtccgtcactgcgaaatacaccgtgtcgcagtgattgtgtgctggactgccgtggtccaggatatccgctgcgtgctcgggtttgaatagcttcgcccgctctgcgaggtaagccggatcgagtaggccctgcgaaggtacgcgctccacgtctggatctgtgacccaccaggctgcgtcggcgaaggcgatgcgcagactctcaatcacggcgtgtaggtattcggctgagttatgctgggcctcggtgaacttggggatcttgcctgctttctcgagttcctccatgatgcccagtgccattagcgccacaatgccctggccatttggtgggtgctcccagatctcaacacccttgttggcttcgccatctgtgccggatgttgattttgagacgatatcctggccggtgaacttgagtgaaatcgcatcgacttcctgcgacccgacttcggcgtgataggctagatcctcgagtgacatgtagccgcccagatcttgcaccacctttacgatggcttccgcgatccggccctggtagaatcctttcttaccatctgcagcgagcgcacggaaggtcttggccagagtgggattcttcatgatctcgccgggaagcggggctcgcacgccatctttggctgaaggatcgactttcaacatctcacggaagtttggagatgcattgcggatttccttctcagaaacattccactgcgcggggttagttgatggtgcgattgcgatggaatttaatacttacgccctttgacgaaagctccgacaccgggaacccctcctctcccagctcaatagcaggctgtagaatctgctcgagcgataacttaccactaccaaacttctcaactgtatccacccatcccgcagccgctccaggcgtggtcacagatagagcattcaacatgggcatgttgcccggctcaccaggggccagaccgaggtccttgcggactttctccaagctggcattaccaggataccgaccagagccattgagcgcatgtaccttcttcgtcttggcattgtagaagagacagaacatgtcacctccgataccggtagagccaggctcagtcatgttaagtccggcggctgttgaagcatgagatcagttcattgtttcctgttgtgattctgcaactcgaggcgaggcttacccacggcaacagcagcatcctgggcaagagaataagtcagtattgttgaagttgaatatgacacgtagaatggaacgatgtacataccgctgcatttccgccctggctcaggatcttatggcctgcagccgcggctagtggttgagtgcatgatacgatgcccttggtgctgtggacggtactccgtcgactgggaaatgggacatagtccgcattggagcgcgaatatacggcttttgcgttgagcggcatgacttggatgatgaccccagggagaagtgggagagcgggggatatgaggggatatcagacgcttatcaaccccactaatttccccgggctgtcgcgaatgataagaacagtgaggttttgcgaattggggaaagttgttgactccaaattggactttataattactaaataactactctgtaacgtaactacctagttaactacttcgtacctaagtacggagtaaataacactcactatatatatagggtactcttacccgattaggaaaggccttagcttatgtacatatacctggtagttcggccgaggttagctagcaagggtatacacatatcgttccatcgttctatcattgttctttccacatactttgtatcatcagagacctcaattctgaaacaaaaacagacatgatcacgtaactcaccgccccgacttcggagcggcaattaatccttcgttccgccatcatcccgccattgaatttcctatgacgcttgtcttgtctgatgaaactgatcttgagaaaggcctctgatggagcagcatggtggtatttgtcgacctcgatgattcattcgctgacggatcggcattcttggagaagccataccctttgattgctgaccccaacacggagtcagccgaactacccacgtcgcatacttccccgaataaaaagaccgatgagatcttaaaccccaatcggaatggattctccgcggctttgagttgttatccgtatgtctttgtttgtcaacagccagcaaataataagaaacagaccccactaacagttcgccccatagcattgtcaaggaaatcgctcgcgctatcgacttgaataccctctacgccctctcgaatacatgtcgtcagttccatctgaacttggcaccgtttcgccagcaattagcgagagagaccctccggtgcgacaatgaatacatcgaaaccctagcagagatgctagacagcggcgctgtcctcccagacagtgtcaaatcagtcatacgactactgagccgtcccggcggcgagcatatccgcatgacccgcgggaaggtgggcaaatgcgcgcgcgacatggtgggcgaatgtcgacgctgcgccaaggttgtatgcagagtaagccaaatccgcccccccgcctaacaaataccagtcgctaaacccagctggcagaattgcacaatcaaacccccttcccagccagcccttaaaaaccgtatccgccgcctctgccgaacctgcggcacagcgccgctctccgcccacctctcccacacaagctcggacccgcacacccccgacccgtttgatgagaacagcgtcgcggctattgcgttcgcgcgcaacccttgtaattgtgaggaagctgtctggctgtgcacgcagtgcggaatgacattgcgcactaatgacacgacataccgtcgtgtctgggcgtggcgcacgcgctacagcacgtacctcggcggcgggttgggtactgacattggtgaaggctgccaaggggtcaagtgcgggcgtggtgagaactgtcttgctgcgcaggagattgagcttgaggtcgactgcgaggctgatgaagggtctgggtctgggagtgacactagcagtactgtacagagtcctgctcctccgtcgtttggttatgaaggaattggtatctcgatggacagccatgacgatgaggagcccggatattgcaggcaggaaatcattgggttgggtggtgttgttaagcataagtctaagaagagagtcaatgttggtgcatgtgttgttgagtatgaggacgagagggagacagggaattatcttgagagggaggagaagggtttgtatcgtggttggtgtgggtggtgttctagagtaattccggcgaagaacgagcagacttgattgattttgctacttatgactgtctgctttagggctttgcatgttgcatgctgcatttgatgcttcggcgacttttttattacgactgatgctggtgaagctttgcattaaatgacatatatcatgacccatgatacggggtcgcttggacagatgctacgatgacctcaagatagctatgcgagatgtgtaaatgacgatatcacaaatcaaaaaccttgtcaagttgatgcatattcaattaaatcttgctaataagaaacaattcaagtactcctgcaatgattcgccccccaatgcaagcacaaatccatcaagcatacaatgtcatcaagcatacaatgtcacatgcagatcgtttcgttaaagtaaaagacaaggttggaagtgaaaaggtgcaaaaaatccgtatggtctcaatgggcagcaatcgttctccagatagtcttgagcctcgactcctctcgaggaggtgattcctcgcgcctgtggcgacgatgagagcgttcctctcttgactccctggaacgccgggaggcgccctcaggcctcttctcccgctccctctccgtatcaccttcaatttcccgttcacgtgcgtgctcatgcgcacgctcatgcttctctcgatctctctccctctctcgctctttctccttctctcttcctttcctctcttccctagatcgaccgtgctctcggccgtgctctcgaccgtgttcagtcgagtgtcgcactctcctgctctcagtgcgctcaacacgctcactgcgaggatgctcctcttcgcgtcgtgaccgtgatccactagaccgaccagcagactgaccctcctcatactccgcccgatcgtgacggctgccactgctatgacttggcgatgatcggcgcggattttcaatcggcggtgcagccttggtggcatttaggcgcagcaaaggcccattggtatccgacttgccttccgtcatgtatcgcaggaaggcacggggcttgggcgtcggtagcgatgttgatacctgcttcggtgaagaagtcctggctgagcgggctcgttcgagagggctcgagggagtatcggaggtgcggcgtttggatctgtgctcgatgacttcggcctccatttctggttccattgctctctcctgctccttcgccttctccttggacgagctcttcgagcgtttcagtttgtcaggggcggggatgccgctgcgctctcgttcctcggcaagagcgcgctgctttcgttgcaactgggatttctcatcatgttggcgtcgtgcttcttccagcgctttggcccagcggttggtgaagatgcctcgttcgctcttctggcgctggagttgatcccggtggccgtcggatgatgtcttagaatgccgacgctctccctcgatcggtgaactgcgctttctgcggcgtcggctgtggcgggctgctgcggcttctgcgctttcgtcgagaggctcggcatcgatcatctccacctcaggctgggagtctcctgggggtggtacgagctcgtcgggcgccacttcgtcgctatcgggaacagtgactggctcccgggtagcttctggttctgctggtgggtcttcagcggggaggtctctggcagcctctggctcagggattggctcctctagcggtgtctcaggcattgcctcttccggcgttggagtctcggctgggactgcagctgcggcctctggtgtctcagctggggcctcgtccggaacaactgtttcagccaagggttcctcaggtgctgggatctcagctggggcagcttcgacaggagctggctcttcgggggttggctcatcagcaggtgcttcctctggaatctcctttggtacctcatcgggtacgacttccggttctgctacgggttctgtaggtgtctcggtagcgggcgcttcttccactggtgtctcttccactggggcgggagcaggtgcctcctcaactgctggttctgggacaggagtctcctctacagcagcggggacatcttcggtcacttctttcacttcagcggcaggctcttcagcagctgcaggttcaggctcagcgggagtttcagcagcaggctcagtgggctcagcaggggcttcaacaacaggctcaggctcaggttcagcagcaggttcaggctcagcagcaggctcaggctcaacaggctcgggagtgggctcaacaggagcttcaacaacaggctcaggttcaggttcagcagcgggctcgggagtaggctcagcagcaggttcaggctcagcagcaggttcaggctcagcagcaggttcaggctcagcagcaggttcaggctcagcagcaggttcaggctcagcagcaggttcaggctcagcagcaggttcaggctcagcagcgggctcgggaataggctcagcagcaggctcaggctcaacaggctcgggagtgggctcaacaggagcttcaacaacaggctcgggagtaggttcagcagcaggctcaggttcggcaggagcttcaggctcagcagcaggctcgggagtgggctcgggagcgggctcaacaggagcttcaacaacaggctcgggggtaggttcagcagcagtttcgagttcagcagcgggttcgggagtaggatcggcaggagtgctttcttcgactggtgcctctttgggagtttcctcgactgtttcgggctctacagcttccaccttgccctccgcagcagcttcaggttcggcagcaggtgttccctcaactggtggttccttgacaggttcttccggagcctcttcctcttctgctgctggtgcctccgttgtttcaggtgatggttcagcctccggcgttgactctaccgctagctctggctcggcggctgattctggttcaggcgttagctctgccgctggttcgacagctggttcgggttccggcgttggctctggatcagctgccttagcggccttccccttcttgcccttctttttcttactcttacccgctgccttttcctctgcaggtggctcctccgagggtggctcctctatgggtggctcggctgctgctggctcttctggagctggggcatcaggaggattatctacgggctttnnnnnnnnnnnnnnnnnnnncgctggctctgccgctggctctggctcggcggctggttcgggttccggcgttggctctggatcagctgccttagcacccttgcctttcttgcccttctttttcttgcccttacccgctgatttctcctctagctttggctcatctacggatggctcgtctgccgttggctctgctggggctgggacatcagggggattatctgcaggcttttcgggctcggcgtctggctcctctgtgggtggctcggctgctgctggctcttctggagcaggggcatcaggagaattatctgtgggcttgtcgggttcagcttcaggccccggcgctttttcggcggctggttcgggcgctggctctggatctgccactggctccggctccggctccggctctggctctggcgctggctctggcgctggcgctgggtcggccgctggttcgggttcgggcgttggctctggatcagctgccttagcggccttccccttcttgcccttctttttcttactcttacccgttgccttttcctctgcaggtggctnnnnnnnnnnnnnnnnnnnnnnnnnnnnnnnnnnnnnnnnnnnnnnnnnnnnnnnnnnnnnnnnnnnnnnnnnnnnnnnnnnnnnnnnnnnnnnnnnnnnnnnnnnnnnnnnnnnnnnnnnnnnnnnnnnnnnnnnnnnnnnnnnnnnnnnnnnnnnnnnnnnnnnnnnnnnnnnnnnnnnnnnnnnnnnnnnnnnnnnnnnnnnnnnnnnnnnnnnttgcatcggctgatggttgatcttccgttttagcctctgggtttgactctgctggagtttcggcagcctctgcaggtgtttcatcggcctttggtgcatcttccccattctctagagcgtcttcggcggccgctttagcatcagcctctttctcggctgctactgtctcaggatctacatcaagatcaagatctgggaaagcttcgtctacatactgtcagctttgtaaggactaaggtaaatttgaacactgaccatcgttgccgttatcgcctgcttttttcgtgtcgtcgcctgctggagcatcttctccaccttcgagttttgcatctccttcggattttgcgttctcttcagacttcgcactatcgccaggcgctgcatcgtctccgggttttgagtcgccttcagactttgggtcttcttcagactttgggtcttcttcagactttggatcttcttcagactttggatcttcttcagactttgggtcttcttcagactttggatcttcttcagactttggatcttcttcagactttggatcttcttcagactttggatcttcttcagactttggatcttcttcagactttgggtcttcttcagactttggatcttcttcagactttggatcttcttcaggctttgcttcctcttcagtttttgtatcgccttcgggtgctgcaccatcagcaggtttagcatcctctgcgggtgtcgcatcttctacggcagcctccttagaagcctcgtcgggatttcctgcatccggtgctggctcatccttgccctcttctttagattctgaggcaggttcgtcgggttgagactcggctggtgcggcctctactgaatctgagaaaattgcgagttaatatcaagtacaaaaggtagaaaatgaacctcatctatagaaacctgaggctgtacttacctgtgggctcagcggctgcgctatcatctccacttggctcagcggagggatcttcagaggcagggtccttctccggttcggcggtttcgggctccttgttgtcctggttttggccctcggtcagatcggtcgttgaataggtgacagggtaaaaatggaaagaattagtctcatagtcaaaggtcgtatattgacgttcaaccgatgcatatgagaactcagggatctcggcatacttgaaagccatcttcaacagcggctgctgccgggtccagggcagagtctttattctcgagttcagggggtggcgcggaaccggcgggagaacgattgttattattcttattgttcttcgtcttcttcttcttgggtgccattatacccggtcaatgacgtatcatatatcgaggcctaggcgaggctgactggcgcgtgatgtgacgagaaccgggacaataggaaattgacaagtcggcttgtcgggctcgacacacggaaaggaatggggcagcaagggaaatcgaggaacaaaaggtacaaaggatggacaattgagagagtgaaactgggtagggtacctcatgtattagagtactaaaatggaaaagaaggatatgcttgtttctctggtgacacagaggtcgcattggatagtcatggtgaggcgacgtatagtagttcgtctcatatgcggtcggatgggacgacaacaaagtgcattacggtcttgggccctgaacgtcaccaatgaactggccgatagagccaattgtcattgggccacgttggtcgtcgggtctccatttccaggagtgaggtccggtgcttgattagggccgggtgagagcagtacgctccccacccgcggaaatacctgcagcaccaaggagtaaatggtgagatgggattggaaatcgcggggcagatcggtcaaaataggaaaaacagtactgcaggatcgagaaaacgggtctgttgaagtggggtggacgccatggaatgaattggtttgaaatgaatttgaattgttttggtttcgtttgcttttgggcctggatactacacactgagatgagaaatatgaattgggccgagggaacttggccgctgtacacaaagccacgaaggcaatgtttcaataggaaaaccgatgggcgacgcagaggtgatgcaggccaggcccatttctgcccaacgtgttccggtagacgcggcaaatacgatgcaggcgtagtacaccgcgggtggggagaccagggcaattaaccttcaaaaggatccggtattaggggcaaatattgggacttctagtacatgttttgcatgactggtagattcgaatcggagatgcgaaacggggtggttggggcgattgagattgtacggggctaataatggagtcgtggatactctcgtggatagttgaatctccactctcgacaccgacacttcagagtattgtccgagctcttttccggggacatcattctgtaccactcgactgtaagggagtcagcagttgaaatggcgatgtaatatgcagttaaacatcgtggactgcatcaacaaatctttgaagtggaagagagaaaagtggcggaacacgagtttctcgggatcaggtgatattgcgcattggacttggacgtcagattctatgtctctactgtatttccattccacctatgactacagagtacagagtaagagtacagagtatgcagatgcagtccagccgatcattactatcctcgcgtcaataccagccactcctgaaccaacccgtccgccaatcccttccaaggtttttaactttgtctgactaacaatctacaacaagttaactaaccaactaactgcctcactagttacctggtcgacagatcgtcttactttgtacggagtacaacggcttttcaccggggtcctcttctttcaaaatgacatatgtgttcaattcgaccgaaggtactcggtactccgtacctaagagataggtacaaaagccaacaactatcgagtctaaaaagagctgcatgcatgaccagggcacttttgtcttttctagcggattatcctttttgtgcaattaccgatagttatgctgtacttcctaactaatacaagtccttagtcacatcgccagatacggtcacctatgtacccaatgcagcgggccgagcatccatgccgtgttgcgtgtggttagcaaatagcagtctaggtgaacccctcgcatttgtaaatatgattcacatctgattatgatgtcgtttgtttctattcccagaattgggccatgatttttgtgttctgggctcctgggctcttcgactctgtagataggcataaacatcactttctttgccaagctttcctttgccacccaggcacttgaaaggaacatgccgatcggagagggctcgaggttaatagactcttattcgatatctgatattctatatttgatatttgatatcgcatatttgagagacaggctgtttgaagtatagcttagtaaggatgttgccggcatcgaatcttctagagaatgaccggtgtgactaccggcatcatcggatgaattgcttgatcggcaataatggcccatgggaaagcaaccgccaatatcgcttacggagtagaaaagctctgactccacagcgtgactccagcacataatcccctcaactcctctatcccaccggcgatctttgctctccctcacgatagatacatcgaatgttcgctagaagtgctggctagtcaataccatggcgtaatgaagctctgattggttgccttgctttttttcacggtgaattgatacgtgcagtattacggagtagagattgaagtacaacatgtaggtaatagcaacgtcgccagctttatcgtacgcaatcaattgcccctagtgattcaaggactcgagaatgcctggtcgaaaaggtaatggggttgaagtattcacacgcgatgaaaactctgcttaaacacatctcaatacacttcccccattgcttctgactcattcttggcttccatatgtcagcctcaagtcttatccaataggctccaactcttgtcagatacgcctcggcttatttccgatatgaataaccctacaactctggtgcaaggcgacgaatgtagctaagaatatcgcgattttgctttcatatactagtttagaaccaatcctctccttctgtaagttctgctcaaagtccacttccttcaccctgctgtcggattgcctttaggcaatataatcatttctcctcgtctcgaactgtttgccgcagattggctaaattggtttccacgctgttgactacgtcgtccgatgattccgggttccccttcgaaccatcggaatcgagcattgggcgttttgctattcccgcttcgggggtagtatcgcttttgcgcttttgcgctttcggtgggttatcgctcgtttcgggatcccctcagtaggctttgtaagcacgtaccggttctccctaagcagcttgcgcagtattcctggcctgaaaccaaaatatgtgcagtgaacttgccattgtattgctggcagtacacacaagattcctctagggtgttatatgccagatctgtccagaggaaaagagtgcaatttcatccaaactcgaagtacaagagaggacaagaaagagaaactatctgtgtgtcccgccctcccgttttatacgtgtccttcttgtaaactgtgcaaaattcaaatggtggctcttcaagcttatttggatgtagcttgggagagagcgaaagtgcaaatatagcaagtacgttcttcggcaaatgcgttccttttggatcgtcacacaactcacttgcagcttgattgcccagtaattcttctccgctgtcattagcagacagctgaggaatataatgggttctgtcatttctggttgtagtggacggcttaagtccttatatatgtaggactccttggcattatgctccgtcaagcttctagagcagacaacaatatcatccagatatgttggtggcgtttgtctttggtttattgccagcccggtaccttgtcgtctccgaaggctctatatattgggtcgggatatgcggtcccttttcttggctcgtcgggggagaggccgtttcttctaggccatattggagtgactaaaggccttctcgatgagacccagtgtggttactatattcaattagctatatatcccttctactctatgtcttgggttgcgtaccttgcccaagaacttcctcactggggttttgagcttgaagaagagcttataatgctctttagccataatctctgtggcaatgatactttcgctggccgcaccctccgcacccttgctaacaaattgcccgcttcaaattggtacgggctaccaggctgtcggtacgcgagtcaccacattggcacctgtctacctccaacacttccacggcgggtagtggaataactccgcagagatttagcgtcacaacccaatcaatcttttttcggcaatagcaacgagaaagctgtgttagactcggtcgaagttacaaagtctatctgagttacggaattccacgcagttttcgaggtcctttggcacggacagcccgcagtggccaagtgttggacaccgtccgaatttcaaaggtttggattgaccgctcgaagtctgctattggaagttgatatagtggtaaacttataggtattggaagagacgataacctacgaacatctccaggagaagcgccctgaggggtattctttcctccctttgagctgtgtagacggtgtgatccgctgttcgtccttgttcccatatggctacatattagtcctcaccaaagtgaagggagagccgttggagaagagatgggccgatgcatctaccgaatggaaagagttcatctaccggcaggttctgactgctatcagtgcccttcgagatgtgggagttctctgggcggaccctggcccccacgatgtgctttaccacgaggatgacaataagccttctgtgtctgtgatagactttgaacgcttcgagccacttcatcccgggcaactgccccatgccaacccgagatggcggctatctttggcctggaggcctatctcctgagaaattcgtgacgatacccaggaggctagaaagtcgcatgtagatacctagtcgatgtggttcaaggcctgcaccttgctatgagatgataattgaatatccccctgagttttttctcatgatttattgatatatttttctttctgtcaagggcgccggtcattatcatcctttcagttattataacacccaaaagaagatgggaatactcaaagggaactcccaagagtgtttttataaagtccctagatattctcgagccaaaccgtgcatacgataaaaacgatcatgaacgccggagatagaatgcacgagaacgtctacagacacactcttttacttgcgactacggcaggtttttaggtccatcgcgccaaccgggttttcgccgcaaggtatatatgtagtctcttaaaggtctagaaatagctcgtaccaagggtcccctacttacaatatttaggaatagttagcggttatattctaaaagacactaggaaagaccccaaaaaggtgcgatagaaagatgataacaaagtggtcttctctacgggatgtacgagcgatttagatactataggtattttagagtagggcatatatcgtgtataccatgaaaatgagcctgaacgccggagataaaatgcaacctaagtaggagacaacaaaaacaactcatttccgcatgtgttcatccaaagtctttctccacttagggccgttgattctcatcaggaagatgacagagctgcttgcgaaaccgacgaggccgaggatggtgaagatccagccattgccgatagcaccgatgatcggggccgtgacgacagaaccaacgcaggagaagatgtttcgcatgaagttgttgagggctacaccttccgaggattttttcggcatgaattcggtgagcatggtggttaccatgctgaaaatgagcatggaacccataccaaagaagaagttggcaatcatctatcagatagttagcgagtgctactgaggtatcgttgagattaaataagagttgacataccgggacaagccagaagactcccctctccgcggcccaaccataccagatcagggctgccgggtacatgaaggcgccaagccatgcgttctcacgcattcggtcttccggtcgtagtactagtctacctttctcgtcgtatcggtttgccttcctcgcctcccggtgcatgatgctgtccatccatttgcctccaaatatactgctcaccatgtagcccagcgagtttggaatgtatagcaaaccaacgatgatggtagagaagttgtatggctcctctttgaaggtatgctcaacgctgatattgagcacatagagggaaccgaaggcgatgctagcatagtacacactgagcaggacggggaggaatcggaggtagagaatgattttgagcgggtcaatgaagaccatcttcaaagtcttgagataccttgcggttgcccgaacaatctgttgcgacgagactcgactcagcgggcggtcgatatgtagatcttcctcttcaagttcagccagcacaggcttgtgcacggccaacgtctcgggaagggcgaacaagataaagatgagagtgatagcaccaaatgctgaaaggaaccataacgtgctccgccatccccaacgctgggctaggagaccgccgatgatgggtgcaaacaagggtccacacaatggacccaaatagaagatacccatggcccgtcctcgctccctgggttcccagagatctgcgatggtgccagcaccaaccgcctggacagaagcagaggcaccaccactcaacattcgcattaccacaagcatcgcgatagaatccgagatggcgcagaggcaattaaagaccacaaagagagcaaaagaagccaggtagacggtccgtcgcccaagtcgctcgctaaatgatgaccaccacaatgggaatatcgacatggccagcatatacaacgcgatcgacagattagtgatagtggttgtcgtattcaagtcatcggttacttgtgatagtgaagctgatagaatattagagatgatcagatagatacataatttgggattaaagactcacggaggaatatcgcgctacccattggtgctgtggctccagcaagagcgacgacaaatgtgatgaaccatttcattcggcgagggtatgtcttcggattctcaacctctgccaccaatgctaactggccaaacaagcctctgcgcttggatcgggcgacctcgatgggaggaccaagctccgtcaattgacgttctaggcgtggaggattctccaggtcgtcattttcttcctcggcggtattgctggagacacccgaaagggagtgaatgtcattatcaacctcggactttttgtccgctatgattgtcggatgttctccactgtccggggatgcgacgataccgtctggctcagattgcttgttcatattggatgtatgtgaagggaaagaaaggcgactcgtgccaattgaacataaaataaacctgaatcaaaaaaataaggcgcataaagctttataaaagtaaagtcaagtggagtttaacaaaaaacagccctgtgggagccctgcagatagccacttgggcaccgtaaaagcgtcgatctattcccctgatatataagatcagcaggtatgtgtaggcgcaaccttgagtaaattggatgttgttccaggaaaaagtgagagagagaaaaattccgaatgcatttggagagttggagatttgtgaccgacaagcaccgacagcgaccgagagtcataatattatctcttgcactcaagcgcagggtcacagtgcttgattattcgacatcacgctagtccacatgctatcccataaagatacaagccggcttatagagccagtcatcgttgagcgcgaatgtgccggttttccgtcggcaaatcctgaaggtgtctctccgagatagattggagacttgaagcggtctagatggacgtaaactagaatctgggagagaacagatgcaacattctgattgcatcataaagtatttaacagtcgcaatggacttaccttggctttcgcttggtatccctatattgtacttccccggatattaccttgagctgcccaggtgtgtcaataaataccccagagtcatattcttatcgtcatctaccccaccatatacaaggtatattgtagggcagatccaggtgtacttgctatgattatacaaatctgtcgttagaacagagcgtataccaaaaacaacctagaaacatctttgtacgccgcatcgcctatcttcaggtggagggctgctgcaaggaggtgattaataagcttggtgatactggcgatggatcccggaggtcaacatggcataaagacggtgaactccaccacgtccctcttgacaagaattaatcacctgaaaccacagcaaagcccaaatccaacatgaccagcccaacacaaaccaaaatcaacccaaacgaggtacaggcccacctctcccagtacaagggcgataaatacgtcgacggctgggcttccctgtgggacaagggcggcaatctgccatgggaccgaggattccctaatcccgccctggaagacacgctcgtcaatcagcgcccgacaattggcgcgcctatcgccaccgatgcacagggccagtcgtacaggcgcaaggctctcgttcctggctgcgggagaggtgtggatgtcctcttgctggcaagcttcggcttcgatgcttatggcctcgagtatagcgcggctgcgattgatgcgtgcaagaaggaggagaaagataatgccagttggtatcgtgtccgggatcagactattggcacgggaaaggttacttgggttcaaggtgactttttcgatgatgcttggttgcaggagattggtgtcccgttgaatggatttgatattatttatgattacacggtatggattcctcctttcccttgtgtgtctgtctacgttgtgatattcatcgcaaagcgggaatacatccacgtgatttgataccaataattttgtgactatttttgtccatatctcatgttcctatgttcactgttctcaggctaaccattatgcagttcttctgtgccctcgagccgtcaatgcgacccaaatgggcgctccggcacacccagcttctggccccttcgccagcgggtaacttgatctgcctggagttcccccgtcacaaggatccgcaggccccagggcccccatatgcctctccatcggaagcgtatatggcacacctgagccaccccggcgaaaaagttccctacgacgcaaagggtgtcgtcaagcacgaacctctacgggcaccgagcaaagacggcctggaaagagtggcgtattggaagccagagcgcacgcacgaggtaggccagggcgagaacggggtgatccacgaccgaatctcaatctggcgccgtcgtaactagatctgccgaaaggccgaaaggcacctagcaaaaaccgaagacaaaaatagatctgcaattgcacagtcgggtccattgaaaaggccactgaaaaggccaagacagaaatgagatagcattggtctgagtggcttaggacttcttcacaagggcattgtagtgttcgccgagtccgtaggtgtggcggtagtaagcgagccagataacgcgcttgcgcttctcctcctcgtcgaagctgtcgctgtcaccagactcgatcttttccattcgtccatccttctgcacaacatttatttccacaccgtatgctcgggcaatcgcctgtagctccaactgccctccccactcagcggtcaatttaatctttcgagtgtatgactctaggggctcttccatgaacgcctcgaagtcctctttatgttccataatgaaatctgccgtgacagctcgaacagcccggtagccatcgtgttgcggagaggcgactgtgtcgatccgtgactgtgtcgcgggctggaggacgattcggcttgggtccggccgcaagccgagtccggactcgtcgagttgtttggcaactgctgagtagagacagtgcccatccggagtcacttctacttccttcagacccagctttttgaacacagcatccatgacctcctgttcattgcctctgtagttcgtttgcgtcgcggcttcttctgctgcggcggctgactgggcggcttgctcagctgcacgccgcgcgagacgagctttttggcgatttggctttttggaattgggtgtagaagaaggttctggggtaggttcggctgctggttctgctacttgcggctcctcggtggggttgtcttgtttcaagtctccgtcatctgccgcttgatcatcttccagactgaggtctgcgaggtcttcggcgggatctccatttaattgtgcgatctcggcttgttgtttctcggacagatcgcgctgcattcgctcgcattcatcgttgattcctttccgagttttcttggtggcggactttttcttttgcgtgacccgtccttggagatctttttgctctttgcggtgttttgacaaaaggtcttccattgtggaataacgaaacgagaacaaacttcaacaattctattataacgggggtatatgctatgaatgaagacaaccaaaacacctcgaaccccgcggaaccctgacgatgcagccctaagttaaaccccaaagaggactagtgtctgctccacggcataaggatattccaggtccgtgtgccatcgtgtacctcggttgattcatcaagtagtctggcctcggtagtctggggtagggggtaggtgggacagatgtaacaaatatagacttctctctttgatattcttagtgtattaagtctaaatcacaattacacaatggattccgcaagtcttttcaacgtcaaggtcagatcacacgtattctacctctccgaccattctaacgcgctcacagggcaaagtggtgctggtcaccggaggagccaaaggcatcggtcgcatgatctcagagggctatgtaacaaacggtgccaccgtctacatctcgtcgcgtgatgccaaggcatgtgagcaagcagccaaggagctcaatgccctgggcaagggcaaagcctacgcgattccggccaatttctataaactcgaggaagtgaagaggctggccgaggagctaggcaagcgcgaaagcagtaagacaccacatccaatggagaatcatatcatttctgacaagatgtctctttcctagagctacacattctcgtgaacaactccggctcgaactggggcgccccctacgacgaatacccatccgaggccttcacgcgagtcctcaccctcaacctccaccgcgtcttcgatctgacccagctcgtcacacccctcctggagaaagcggctacaccggaggatccttctcgcattatcaatatcggtagcatcgatggactccgtgttccctcgctcgagacattcgcatacacttccagcaaggccggtctgcaccacttgagccgggtgcttgccaaccacctgggcaggcgaaatatcacgtaagtatacattatatgcttcacctctcttcgtttgatgtatcgagaactgattcaatttgcagctctaataccttggcctgtggtccttttgaaagtaagatgatggctgctaccttgaagacattcggtgactctatcaaggctagcgtgcctctgggtcggattggaaccccacaggacgtggccggggcttgcttgttcttgagtagccgtgccggtgcgtttgtgaacggcgcgactatcacactcgacggtgggagtgccgtctctgccaggttgtaagcaatggaggatatctgtaaatagctgtgttagcataagcattattggtgttcctagttagagaggactgaattcgggagagaatccctgacattccaatcaatggctggttaccatattcgtccaagggacaatcttgttatgagtcactaccccagagatttgcaaaattcatattcgcctttttatacatcgcacctcaagagtctcgccttcaaattgttatctcaaggcttatcaggcctggagcggcgacataagtggagcggcgacatcatcaatgggaatgcgtcattgcctttccacctctgccaggcccaaaacatatctttctatcaagttccccatcagtaccatctcgcatctattctcaagcttcatcaacacattacttgcatctgaaatcgtcttaatcgccgaacaaggatcccccgccttttctgactgatcgcaagtatcatcgaagtacaggatacaatttccagcatcatatatcagacccgttggagcacctgttcttgctgctttaagtttctcgactgggaatagtcggtgtggccgctttcgtaacgcacatttgaatttcaaattgtgccctctcttcttcttccgccacacagaccatgagctcgtcagatgggcatactcggtccggttctagctccactgatccctattccaatccagatgtctactatggcaaggaggataatatcaacaagttcaaggcgcgaagacgtgcattctcggtggtaagcagccacccctgaacagtaccccgcggtacaaggtacatcaagcttatctttgactgggatctacagggtctgaatgactacagccgcgaagacatcaataacttctttggaaccttgccctctcgacgcggtagccacggtatgcttgttataaatatgtcggatatgcggtcggtgcgaaagctgacagcaggacagatgaggcatcgggacaacctcggaagttccttatcgaggtggacgagacgcttgcggctcttttgaagcaggaagatacagaccaaaatatgcagatcaccatcgaggatttgggacccaaggtacgctggatggtgtcaaacacaaaaggaccactactaatcgatgtaggtgatctcggtcggaacagcagcgtcatctggacataagcgagtcgacgtgcggggcacatacatgctctccaacctcctccaggagcttacaattgccaaagactacggtcgcaagcacattatccttgatgaagcacggctgagcgaaaatccagtggcgcggctatctcgtctaatcaagaactctttttggaatgccctcacgagacgcatcgatggctccaacatcgaagtggcgggtcgagaccccaaggattggactgcggacccgcgacctcggatctatgtcccgccgggtgctccaatgcagttcgaatactacgagcggattgcgaaagaacgccccgagctacgccttgatgtgcagatgctgccggctgtaatcacgcccgagtatgtgataggactcaacgacaagcccggcctccttgcattggctatgcagaagaagctcaacgaatcgaccggggagactgatctggtcggtgtgccgttcgtagtgccaggcggccggttcaacgagctgtacggttgggatagctacatggaatccctgggactgctcgtcagcgaccgcgtcgacctcgctaagggcatggtagtcaatttctgcttcgagatcaagcactacggcaagatcctgaacgcaaatcgatcttactacctcactcgctcgcaaccgcccttcctgaccgacatggcactgcgcgtctacgagagaatcaaaaacgagcccgattcaaaggagttcctgcgcaatgctgttctcgctgccatcaaggagtacaacagcgtctgggtgacctcccctcgcctcgatccagagtctggtctgtcgagatatcgccctgaaggttggggcgtgcccccagagaccgagcccactcacttcgtgcacattctcactccgtacgcacagaagcacgggatgaccttcgatgaattcgtcaaggcatacaacgctaggactatagtggagcccaaactcgacgagtacttcatgcacgaccgagccgtccgcgaatccggccacgacaccagctaccgctttgagggcgtgtgtgctaacctcgccacagtcgacctcaactccctgctgtacaaatacgaagtcgacatcgcacgaatcatccgcgtgcacttcaacgacaaacttcctatcccagcagagttccgcacacccaaaacccaggacatcgaaaccgagtcctctgcagtgtgggaccggcgtgcgcgcaagcgcaagcagcatatggataagctcctctggaaccctgagaagggcatgtacttcgactacgatacagtcaagaaggagcgcaccgaatacgaaagtgccacaaccttctgggcaatgtgggctggcctcgcgtctcccgcgcaagcagctattatggtcgaaaaggctctgccacgcttcgaggcgttcggcggcctggtctctggcactgaggagtcgcgcggcgcagtgggcctggaacgtcccaaccggcagtgggattacccatatggctgggcgccgcagcagatgcttgcctggaccgccttcatccgctatggctatcaggaggaagcggagcgactggcgtacaagtgggtttacatgatcaccaaggcgtttgttgacttcaacggtgttgtcgtggagaagtatgacgtcactcgtcctattgatccgcatcgggtcgatgccgagtatggcaaccagggcacggacttcaagggagctccgcgtgaagggtatgttcttgtccttactttctttcttttgttgatacttgggtgctaattcgaaaatacagattcggctgggtgaatgccagttatgtctatgggctggagattctcaatgcccatatgagacgcgccttgggaactatcactccctatgagacgtaccataaggcagtcgttgctcagaatgcattctgattgaatttgggttgctcttacagtcaaaattgttgcacaggctaaaagaggatagaaaattcaggtagaagtgagcaagatatttgaacatggtcatcaatccggcagtgtttattgtctagcgctagttttcggttaattcagtcttttcgtttgctaaaagaaggttgataaaataataaaaaagaatgggcgtcgtatattctcgactcacagcatgtgccagtagatgtacgccgtactgcgtactccgtatgcttcatgcaccccgcgatctcgttataacgaacccggtgttgacgagtacgaactggtaccggcgctttaattaatccggcgtaataatgaatttgccccttactaaccggcccttacatttgttaccaaaattacagaccctggcaagcagggccggttagttacaacgtacgtattggtccacttacatgtacgctgagtcattccacgacgaccaatcagaattcatggaataccgcgatgatccatccccacttccaaggttcttaaagctcggtccacctctcacaaggtcgctctccaggactagcggcgacttcctcttcgggagaaaatcagccaatggtgtatagagcttttccaagagttcgttgagatgaggaaatgaccgatattgaaggaaagcgttattagtaccttttcagttcataaatttggaacccaaatataaataatatatgggcccttacaagaaccctccacgtaatgaacatttagtcatgtctcagttggtcctaaataaataaatccggagtgggtttcgctgttcttaaagtaaatggagtccccgccaaatgagcttgagtgcctggagtaccccagaaccccaacccgaaccaaaggcgaaaataagccgatagatacctcggcagaccaaccagggctccgaccgaaaaaagaccgcatttcagagatcccgaaggcgtcatggctctccagatcgaaaattgacgggtgcggagttggggatccctcgttttcccgaggtagttctcgtgtctggggctgaggaattggtatggatgtatggatgtatgcacttggttctggtcatttatattcttgttgtttgtttgttttttttttgtagggggtgggtgtggttgttggttgtctcgttaagcttatctcatatctaatgttcatctataggagagacacgcgactcttcgggtgatgagtgtaggtacgatactagggatgttttctggaaatcttctagagaagatctagagatactttggttcatgttcttgttctagactctactttctgttgtacattccgtacagagtacggagtggttgttcctgatctaccagtcttatcggctctggatgcggatgcggttagtttggcagagctcagttgtgccgaggtccaactcgtaaggcggtttttgagtcattttcccttcgatcaacagggtggaccgcctgcgattggatagttcatttagaggtgtcatgtgttccggtctgatttcgtggagatgctgatatgcggtgatattcggcatatatagcgtaagtgtaatatagtgcaagtgtacaatatagtgcaagtgtacaatatagtgcaagataactgcgagtatgaaggattaccgcgaggatgtagactgtatagcttcgagactatagaacttgatctacgtctacttgtgtgcgcaccacaacaataaacgccgaaaatcgccaaaacacattccatggtaggaacactcaagtcaaagggatcttgaggatttgcctggtggatacctttcgaataccggggcatgacaaaacagcaaggatgactcaggcagacctcgttcccaaggttctgggcagcttttctctccgaatggcgattcttgcaattggccagacgggcgtgatattacggggagttcctagtctatttgaaattgtattattgaatattattccccatgaacattgctccgaatgcagtcgatgcacgtgaaaattagcttacgatatgtcccgtattgtcacggtcatggcatgtgtcttcgacgtcatccggccatctccacataaaatcgagcattcaacatctcacgccaacgtggaatcgagggggaaacgagaggaaaaagcacatggaatgaaactccctcgacgttccagtgagatgccgattattgtgacactaatggcagatttcgaaaacccagtggcaaagggttgtcccattagaccgaggatctgagcctggatcctctcttccgagacccgccttccgcctttcggagcactttgcccgtgaaagattcctgaatgattggaacccattggaagagtgcctaggcattgcgaggtattcgcctgactcccggtgagccgagcgtttaccgactgtgacgcatttgaatgtttaataagtaccccgggttttctggcttgtccgtttcctcttttttattatagcttctcttctcttcctcctccctctatatcccttcctaccttgcttcattctatattcgaagcttcagaacagacgtgacactacctgcacgcctgaatatactatctgactatatctttactatctttaccctttttctgtattataccaaaagtcatgggtctctacgaagatgaggaccgccagttcgcggcagaggttcaggccgttcaaaactggtggaaggactctcggtggcgctacaccaagcgccctttcacagccgagcagattgtggccaagcgtggcaacctcaagatcgagtacccttccaacgtgcaagcgaagaagctctggcgcattgttgaatcaaacttcgagaagaagcaggccagctacacctacggatgccttgagcctactatgatcacccagatgtgcaagttcctcgatactatctacgtctctggatggcaaagctcctccacggcttcgtcgaccgacgagccctcccctgatctggctgattaccctatggtatgttgataatacgatatcaaaagtgtggatgtatacttacaatcattctacaggacaccgtgccccgcaaggttaaccagctgttcctggcacaactcttccacgaccggaaacaacgtgaggagcgtgttactacccccgcagcccagcgtggaaccgtcgccaacgttgactacctgcgccccattatcgccgatgccgacactggtcacggtggtctgaccgccatcatgaagctgaccaagctcttcattgagcgtggtgctgccggtattcacatcgaagatcaggcccccggcacaaagaagtgtggccacatggccggcaaggtcctcgttcccatcagcgagcacatcaaccgtctggttgccatccgcgcccaggccgatatcatgggctccgacctcctcgccatcgcccgtaccgactccgaggccgccaccctcctcacctccaccatcgattaccgcgaccacgccttcatcgtgggctccacaaaccccaccatcaaggatctcaacgacctgatggttgccgccgagcaggctggcaagaacggtgcccagctgcaggccatcgaggacgaatggaccgcccaggccggcctcaagctcttcaacgaagccgtcatcgacaccatcaacgccggctcccacgccaacaagaagagcctcatcgaccagtacctcgctgcctccaagggcaagagcaacaacgaatcccgcgccatcgccaagaacctcaccggcgtcgacatcttctggaactgggattccccccgcacccgcgagggcttctaccgctacaagggcggcacccagtgcgccgtcaaccgcgccatcgcctacgcgcccttcgccgatctcatctggatggagagcaagctgcccgactacaagcaggccaaggaattcgccgacggcgtgcacgccgtgtggcccgagcagaaactcgcctacaacctgtccccctccttcaactggaagaaggccatgccccgcgacgagcaggagacctacatcaagcgtctcggcgagctcggctacgcgtggcagttcatcaccctggccggcctgcacaccaccgcgcttatctcgcaccagttctccaaggccttctcccagcacggcatgcgcgcctacggcgagctcgtgcaggagcccgagatggaggagggcgtcgacgtcgtcacccaccagaagtggagtggtgccaactacgtggataacttgctgaagatggtttccggtggtgtgagcagcactgctgctatgggtaagggtgtgaccgaggatcagttcaagaactgatttgttcggtgcggctcatgttgataccctgatggttttggctgtctatctctatatatgtgcttgatgtcttgtgtatgttgattgtggcgttttcctttttgtttctatggtcttgacttgattccctgtcggtcttgctctcctgttggatgagtgggggccgatttattttgcattttggaaatcacgacataattgatttacatcttgaatgaatgtgacttttttggtggttatttaagttatagtgtaaacctagagggaggatgttcttccgcgttcaaagtataaattagtgctgaacaaggacacctagcaaagttaatcattattagacgggtggatatttaacaaattatcattgaagatggataaaaatagagaagttagcgccccataaaggaccctaaatatatattgtctattaaatatataacacttagcgaacttgatttagttaccctagaagaattgccataatcaagaaatagagcacatttagagtcaagcacaaggtgcatgttcaccggtttaataatagggatgtactagtaaaaagacataacaagaatcatcggatcattgaattaggacataagaaaattgaatgaagaatgcgcccctccttccaatatcagtcgctgaaatattcatcaaggagtcagtaagtggtctccagccgtcagacgtgcaccagcaccgctgggcaggaacaaattagttaatgagctttacgccatatcccgacatgcctcaaggtccgaatctcacactcgaagcgagtagagcgcttgttaggagccttttcccatgcatccgtcgcttgcttgcgcttttgatttggcgacaaagattccaggggaggccgtggtattttttggagctgtgctcgctcaaagtcaatgaacattacccgaccactgtccttattccagaccatgtttccggcgattggatcattgtgaagcacgcccaatgcgtgaatagcatgtagcgagacttcggcttctttaattaaccaatctggttcaacatcgtgtggcttagccagcgtcttgcccgcataccccatcaacgtcaaatgtacaatatccgcgatgccgtcgtaagagaatggttgacggagaggtaagccacccagtacaaccggcacgtgcaccccctgtattggtcgaagacgcgaatacacactttcctcatgttgggcgtatttaacgaactcgactggcacccctttgccaacgaaagtatacccgtgagacagcaatgtcactttatggagggctccgcgtgagccatgaatatgcaaggaatcgcatcctatctccaagtcaggccgcgggtcatgcatggagagttgtcgatggaggagactaatgagtgtcacctgactgattgagtgtcgaccaactccatgatcccgcacattggggcatttctcatctaatcttcctctcgtgaccaagcctaagaggcactgctgtgtacaatactggcgagatttgccctgtgaggaagagcctcctctggatattactgtagttgatgatggtggcaagggtgaagaaccggcgaagcgggaatcccggggccttcgactgggggtatttgagtcgaattcgtcggaagaatcatcaaacccagacgaactcggaacctccaacggaacgcaggattcaaaaagtgcagtaggcattgatcgtgtcttgacgggagacatacgacagtatttgtttctgctctttggggacatgaaatcggaatctgaacagggtacatccttcaccttctctgcttcctcccaaaggtctgcatacaccattacccatgtgtccagattttttgctgccgagtttctccactgaatacttcgcggcggtgtttgcaaagctcggagggtaaaggccaacacctggccgagtgctgtcaagtgtaatctgttatcgtcgcctgtgttgccggtccatccagttgtatcaccaacatcttctttcggcagcgatagataatagtacacggtggaaggatcatcgtgtggaacacgaagaaatatgaatgcttcgccggtacacacatatccatactccagccctgctttgatcatgtaggagaacgcctgtgtgatgactgcagccacaacgcgccgacaagtatcttctggcttctcaacttcctgataacaaagcacgtcgtcgagctctatgtccgagagcccagcctttatatgagcaagcgtgagcttatgtggcgctttgtattcgacaatgaaggcagggaccctttcttcggggcctttgttgtacacacagaactggtccgctcggggtctagagggctttcgcagcataggattttgatcattcgcaactgactgagccgtaagttgaagttgagaagtatgcgactgttttgcggctaatcgctgtgagcggcgcggttgtccctgcgtcaagctcagagatcccatatcggccactatctctgattcgtccgtcaatgtgttcgcatggttttcgaaggtcacatccccattgaggtggaagactcgtcggagttgaggacttgcatacagcttctttatgacctcggcgacacgcaattcgatcgtgaaccgttcaaaatagccgagatcgagctccgagcccatcattccttgaacatcttgcccatatcgctctagcgtatgcctcggcgtaaagtggcgctggacgacaagatcaacgcacatgagattatcccatatagttgtctgctcctgtggaaattccacccactctcggatcctagccgggcgaagcttattgtctgcatttgccgggtcgcctttggtcgatgaatctatacaggtttgtacattcatgccaagaaataagtgaacatggcaagcatcgagaaactcgggaagagtggtatctcgagtctggatcctttcttcacttagttgacgtcgggtctcggcctcgcgttgtcgagcttctgccgcaagttgtcgagcttctgcctcgcgttgtcgagattctgcctcgcgttgttgagcttctgccagaagtcggcgcaactcggatacgtctggctccatttctggcgaattcttccaagatgagatacagagtgagaaactcgatgaagggaaggaagggtgaatttgtgtcgccttttctaggtaggagcgagcaaacaaagtaacaaccccgctttcccttagccaatcatatcccgcatagtcgcatagtaagtcttgggtggtttgtgatgcttatgttgtagaaaaagagaagagatggatacggtgtctttctgggtctttctgggtctttcttgtcttttccagtatctttgttggatattgttttgtcgggtcactcttatagacagaaaaatgcaaacagtgaaccccaaaatagtgaaaaaggagtaagatacccgtgttaaacagacagggatcaagagatatagtcacatgatttatggtgaacggctgcttacgtgtacaaaatagcatcttgaggtccaatggatggatcgcgattcgcgataatcccgatatttcattcaaagcctatcagatggtgccacttctgtagaatctacttgtactccgtactcagctaggaatcccacaatctatccatgtccacctccgaaatcaaatgatcgagtacgcaattagcacgctaattatctgtgacgatcataagagccagctggacaaagttcattatgtacagtaatgtagtaagcgagattctaggcaaggaactgatatactgtagcacgactattggcgattgccctccccgtctagggactacaataatatagcaactaagagtaccaagcttaagggcctatacccccactaccaggtatcaaagttgttatcatagggcacagaaagcgcctgtatactcctggattaggtgggagctggttgggacatcggctgaagaatgtttgagacaaaattgtgccgggcaaaggctaattatctacttggaattggatgtcgatcgactattattgttctcgtttactttttgcagctaatgtatgtacagctgaaaattgcggtcagtagagttggcaataactccatgcattgctatcttttgtggttgttatgctgtaaatatgtttactaaattcccccccaggactggataactcactaactggaacataactaaatatttctctaactacatctagttagtcgaccaagacggcaccaattaataatcaaaataagattggctccactttttaattcgtctagaacataataggattgcaggaagcgtcatgccggtcatactctagcgcacttcgtgtgaagccgcggttattctttatctcggcgtgacactcaataccggttagcccttggatttatgtcctcaaaatagaataaacataaaaaggaggcatcggtaaagaccaaaacaaggaatgagccgagagcttgggacaagtgcggggccttcacctaataggggtacggagtacggagacatggcatgaattatggagacatagacatacgtacggagggatattgatatcagagtggtggaatttgcctaggtaaaattactttaggtatagccgttgtagatcccattatgctattatcggggcccacatccacttatttatataatatccgtagacaaccgctcactttccacctctctttctaaccttaatttatcttaatttatcttcatcatggtcgaactacccgaatttaagactgttccgctggaggagattcctgtgcgcgtcgccacggcccgcaaggcgtttaatgagaacaagacccgtgatgtggagttccgtctcgtccagctgcgcaagctatactgggcgtgagtactgggttcttttgtcttcctggtcatttaactaacagttttacagtgttaaagataatgaggaggccattatggaggcctgcacccaggacctgaacaagcctcggttcgaaaccaacctcgcagagagcgggtggctcctgaacgacattgtcttcacgacgcgcaacctgcacgaatgggccaaggatgagaaggccaacgatattgatctcgccttcaagttcatgaatcccaagatcagaaaggatcccctgggtaccgtgctggtcattgggtatgctacccccatcctccacgatgcgcatgagaataccccccgaaggctaacaagactcttccctattccagtgccttcaacttccccttccagttgaccctcggccccgtcatcggtgctatcgctgccggcaacacagtggtgatcaagcccagcgaaaatgccccccgcagcgcggccgtcatgcagaagatcattgaggagagcctcgacccctcatgttacatggtcctccagggcggcatccccgagacacaggccttgcttgccgaacggtgggacaagattttcttcacaggcggcgccaacgttggacgcatcatcgccaaggccgctgcaccgaatctgactcccgtcgtgctcgagctgggtggtatcaacccagccatcgtggccaagagcgcggacccgcgtctcgtcgcccgccgcttgctctggggtaagctcctcaacgccggccagatctgtacctcgcagaactacctgctggtcgaaagatcgcttgttccggcggtcgtacaggagttcaagaacgcctacaaggagttctaccccaatggttccaagggctcctctgattacgcgcgcatcgtcaacttgcctgccttcaaccgcctcaagaccatgcttgataatactaagggcaagatcgtcatgggtggcactatggatgagaaggagctcttcatcgagccgaccgttgtcctggtcgactcggttgaggactccctgtgctcgcaggagagcttcggtcccttcatccccatcttgcctgtggatagcctcgacgaaggcatcagcgtggccaatagcgtccagagcacaccgctaggtctctaccccttcggtaacaaggctgatgtcgagaagagtaagtttccattttgttttcagtctatctgatctattctaaccctctctcctagttattgcttcaacccgctccggtggcgtctcctgcaacgacgccgcgctccacatcccaactctgccctttggcggtgtcggcgagagtggccacggtgcctaccgcggccgcgccagctttgacgtctgggtgcaccgtcgcaccatcacctccagcccaagctggctggagggcatcctggctatccgctaccccccgtatgccggaaagatcagcacgttcaatgctgccagcgctctgagccccgactttgaccgcagcggcaaaaagctgggtatgggcttgctgcgctgcatcttcactttgggtggaggtagtgcgaaggctggagccttcagggctactgctcttgctgccagtaagtgatcctttctaattttctttctgttcttgccaaattcttgccatttctgtggatattttccacatcttgcacaaatccgtcttgtgggtgggtccggtcaatattggagaatttttttcttcagacgaggagaagcgaattccgagatccctacaccaaccccgtggctccttacatggttccaacgacgaagacgcataatctctgcctatcccatatacccctaacctcatgtgctggcttgatcccgttctctccacgccgaggatgcccatcttcacgcttctcttccaatcatttcaacccgcagatcattatcatcaaagcttttgaaaatcacagtctaaccattaatagttgcctacgtcgtcctccagatcctcgaacgccgatctgcgaaattgtgaacgtgaacatgaacatacgtttgcccctgaacttggataccccgcttacgatctacggtcaatcactccttattttggtatggagaagttgggcttcggcttggattaggatgtgtggatgacttcaggatctttttgctatagtgccacgtaaataaatttgccatgtaggtaagtatgtacttgttggatttagttgctctttttacttttggtgattgatgcttttgttacgaatatttgagagctatgtatatttgtaatccattcaagtctttttttgctttcgaggctttttaccctgtagtgagtgtgtagcttatctagacatcaggaatttggaatggctccaattggagccatacatcccaaaattgggaacaacaagaaccccactagcctacagcattacaaggtacaccgctcattgagaatctagacagatccaacatttatatcatcattcgtgctgtcaaatgcagtgattgtcaaatgcgctatccaatcagacaaatgcctcggttcatctagctagccgaaaaaggaattaagtcaagtacattggctctagcagcgccgttcaacgccgcgattactcacgcacaggtacttgacacccttgtatggcttgacgccctcgcctaagccgcgactgcgacgctggtcgatgttgagactttccaccttgataccagaggggagccagcctcgcacggagaaggataccgacgccgagttaggcattaggcttgcattgacctgggctttggttctgcgtggggtgcgggatgtagatgatggagcgaagaacgcggggaggtgggcgttatcctgggattgtgatcggagagggggtgtgggagttttgtgtatggagggatttggggatggggtggtagctgcaacggggtcttcttccgcgtcttctggttgtaaggcagcggaacgggaggatttctttgtggacttcttcttcttctttttgcgcttggaggggtctgaggatcgagtcttctttgatgtgctggcagatgcatcgttgtaggaggtaggcgcctcgtaatagccttgcaggaggttggcattggcatcttcgtcggcatcctcgacactgtcatcaaggtcatcatcagatgatggatagcccgagaccccgcaacgcagtgtggcagttcctgtcagtgttccggcatccttgccagtgggaacccgccattcgaggagcccacttgagggggagaattgagcgtcaccacggctggcctgcatgtccgtgatatggcggacagactttgagatcggtacgctgacgacaacctcttcaagggccggtccggagcttccacttccgcctccgcctaggaatgacggtgttgatgtcccggatccgcttcgggtagctccaggccgggaagagctttggcccgggaaatttgggttcaaagtcagccgaacctcaaattcagaaccagatgacccgagtgatttacggatatccacaatagcaggtaggaaaagcttttccatatggcttggtgcctcatccagatcaggatctatgggaaggagatccacttcgtacccagccaggataaaccgcccgtcgggaggtatgaagctgagctcacccggccgttccttccatcgagccagtcgaacacatggatgaaataccggtagttcgatcttgcgaccaaggacatgctggccaccaggcgctgataacgatagcagtaggtccgggactcccgatattttcgcagtgaatgcaatggtcccggataccaatgcagacagcagtcgtcctgaaggagccatagtaacagagagggattcaatgatgtcgacatatagctcattagaggtatgtcgtacaccgggccgtcgccaaggaatggcgggtccttgtgatgcactgccggcagcgagagattgcttgagaggattggtagatcctagcgttggcgtagatgtactaaatccaggcgaacacattaatgccagataatatcgtttatcaagtcaagactactcacccaatcccacctagcagcttccccatccacccgggaacctcaacaacctcctgtaacgcattgggttcggtattgcatactattcctccatcgcacatttcattaataagctgcgcaacaacatcataattggcctggatcttagttgagagcagcggtgctccaacaaagtcctcaagtacatcgatcacgcgatgcaggaactccagcgccagaagcggctccgtgtcgacttcgcttattgcaagaaacaacagattcgactcaactgtcgagaataccgtcaccggcggtgaagcgctaggaatgtacagcaaggaagggcgtggttcggcatgggcaaggtagaggggcaggatggcggaggccgagggcgggcgggatcgatatacatgttcgacgaggggggcgctgggaagacgggttagtgtggtcttgcaagccgacgcggaatatcccacttttgctcgtcatatatgtaaacggcatcaatctcgccgctcatggtgactgttgtctgatgatgagatccatgtgtcggcgtagattgcatagctctcgtgttttgccgcggatttccgctttccgataactttttcgagacaacaggcatcaaatcatactaaccgggctctggtggtacggtctgcgtttgtttcttgttcttgtcccgaatatattttaatacgatctaaacacattcatctcctctgaaaagcgcgccatggctacccagctgaaagacgccaagcaggctctggccgaggacaagtacgacgactgtctggcctgcagagtgactggtatgtttatttttagcccgtgattcgggctggtattacaagcatttggtactgatattcggcaacaggatctgctgcttttatgggcctgggggtctacagctactacactggaatggccaatctccggaaacaagagaaggccatcatgcaaggcccctcaaaatacaaaatgggctcgcgaaagttagggatcttttcgatttcagcgacattagtgggaatggggctgtggcgggcgtttaattgagcattttatattgaacatataccgaagcatatggatgtgacgaaggccggggtcgagcaggctgtttgatagcgaagtgcaggctggaggttttgtaagatattgattgttatttagttgcaagccaatgataattgccactccgggtatcgggaatatccgcatctatatgctatatgacaaggggaagaagagggaattggataagaaaaagagacaaaaaaagatcaaagaaacccaagtaagacagcagccaaaaagaaaaaaagccatatgcaaaaagtcccttgttatgcacccgaaaagcaccttcatacccggaatttcaaccagccactgtgtgacaatcagaagggaatggtcgtcacttcgtcatcatataatgctttacccaggggaagccctaggtaaagcggcctcgtttcccaccccctcctgacatatctcgtccgttgttaagtcctgatagatcaaagaaatctgggaaagtgaatttcctcttggacccaatactagcaggggactcccgtggcgaaatgcgcgcgttggatcgtgggtggttgttgtgacgatggtgtggccgactgttgcggggcatcaccgacacgctcacaggagcgtcttgcatggtcgcagatgagttgtctgacgactgcacatccatgtcgagctcctgacactgagggtatgtaggaccggcagagaatgtgaagacggcaggcgtggcgaaagaagatgtttcgtggagttgtgtgggaggagtgattgcctctggcttagatgcgggtacgggcactgaagtggggggctgacgagaaattgtttcgggtgtaggtttttctttgcggacagtagccggagtagcacttcggtcacgcttgtctgcctctgtatcttcatcgctgctctgtgatccagttccgtcgcatttttcagttgcccattgtcggaccttccacccctctccgtctccgagaccgaggttctcacggtcaaggaagtggagcagatcctctatcgcttcctggtatcctgatgaccttgcatgggcttgttcacatactgcattcttgtacaggtttgtgacagacagagccgccgccttgaattgctggaggagtagctccgggggttgcgggcggggtgtcgagctcggaagagaggtgttgagggacctcatggagtccatggcagggagcaatgtcaaggccctgctgggcaacgggtttgaggacaaaagtgtttgtgtggacaacttctaatgccgtgcgtcgttcgtcggtagacaaatggcgatagcgaggagcttgcggtgatgaaagagagcagttggaacgaaagagactcaaataatataacaaacaaaggccagaacagccagaatcagacaaatcaggtagttggtcgcctacctgtgcaacaataagcaccaagatgtgtcaacggaggaactttcaaggttgttgcagatgacctggcccggtaacgagaagcccactttccgacggaataacaatattccataccgtaggccctaccgaaaggcggtatcttcatttgccgtcgacgcgctttgaataccttcccgtggttcctagaattattcaatagcattcattctttaggacccccctttatggattgcttcaacctttgaattcgtcttggactatatctagacagtctccctcacctcctcaccacttcgaccgcagctggttctttcttcctgcactacgcgacccgactagtcgcgcgcttccaatattctttgttgcacgcttacatacgtgcttaaatagccagcgcacctattctgttcaccacagataaaacatggctcctgccctcgcgtctgatcctgtctcgcaggcagatactcctatgactgatacaaatgacgacacggtccccttggtgcccgtggatagtgccgacgcgcaaatgacggtatgtgaggttgtgtctactcgcttgtttagagtgaagttctgcatgatttcttatgtgtttttttgattttttttgctctaagctcatgctaattttcactttcgcaatctagagccgccaagacaccccagattatacggtaaagacacctttggtctacaacgctgtttattagagggcgttgctaattatttgataggactctgacacaaatgcaaacaccactgcaagcagcgttgcgggcgacgccgcggccgatggacgtaggcgcagatctgaggccaatcacctcagaaaaagcatcctaggcaagaagcatggccgcctcgataatacaaaggtatgggctataacataaaatttccaatggcccatttgctgatacatggtatctcacaggaggatgattcgattcgccgattccgataccttctcggtctcaccgacctgttccgccatttcatcgagacgaatccaaaccctgagattaagcagattatggcggaaatcgaccgacaaaatgcagaggcagaggaaaaggcccgcaagggtactaagcgcactgggggtgctggtagtgagcggcgccgcaggaccgaacaagaggaagacgcagagctgctacaagatgagaagcagggcggcaataccactactgtcttccgagagtcaccatcatttatccgtggtgagctacgtgattaccaggttgcgggcttgaactggctagtttcgctacatgagaacggtatttcgggtatcctggccgatgagatgggtctcggtaagaccctgcaaacgatttcattcctgggctatctacgttacattcgtgatatcaacggacctcatttggtcgtcgtgccgaagtcaaccctggacaactggaagcgagagttcgcaaggtggaccccggacatcgatgtcctggtgctgcagggtaacaaagaagaacgacagcagttgatcaatgagcgcttagtcgaggaaaagttcgatgtttgcatcaccagttacgagatgatcctccgtgagaagtcgcacctgaagaagttcgcctgggaatacattatcatcgacgaggcccatcgaatcaaaaacgaagaatcctcgttgtcacaaatcatccgccttttcaactcccgcaatcggctactgattactggtactccgctacaaaacaatctgcatgaactgtgggctttgctcaacttccttcttcccgatgtcttcggcgattcggaggcatttgaccagtggttctccaaccaagattccgaccaagacaccgtggtacagcaactccaccgtgttctccggcctttcttgcttcgacgtgtgaagagtgatgtcgagaagagtttgctgccgaaaaaggaactaaatctctatgttcctatgtccgaaatgcaacggaggtggtaccagaaaattctggagaaagatattgatgccgtcaacggcgccgctgggaagcgcgagtctaagacccgcctgttgaacattgtcatgcaactccggaagtgttgcaaccatccttacctgttcgagggagctgaaccaggtcctccatatacgactgacgaacatcttattttcaactccggaaagatggtcattctggacaaacttttgaagcgcatgcaagcggacggtagtcgtgtccttatcttctctcagatgagtcgtgtactagatatcttggaagattattgttgtttccgagactacaactactgccggatcgatggtaccacggcacatgaggaccgcatcgctgccattgatgactacaacaagcccggttccgacaaattcgttttccttctcaccaccagagcgggtggtctgggtatcaacttgacctcagccgatatcgtggttctcttcgacagtgactggaacccgcaagctgatttgcaggccatggaccgagcccaccgcattggtcaaaccaagcaggttaaagttttccggtttatcacagagaacgccattgaagagaaggttctggagcgagcagctcagaaactgcgcttggatcagcttgtcattcaacaaggtcgttccggacaacaggccggaaaagcatcttcgaaagacgacctccttggtatgattcagcacggtgctgccaacgtcttcaacaccaagggtggagatgcaaccgagctcgccgaagatgaggatatcgagactatcctgcgtaaaggcgaagaacgaactgcagagctcagcaagaagtacgagaccctcggcattgatgacttgcagaagttctcctctgagagtgcgtatgaatggaacggcaaagatttcaccgagcggaagaaggacatcggcatcagctggatcaacccagccaagcgtgagcgcaaagagcaattttattccatcgataaatactaccgccaagccttggccactggaggccgaaccgccgacacaaagcccaaggtaccacgtgctcctaaacaaatcactgtccacgactggcaattcttccctcctggtctccacgagctccaagaaaaggagacggcctatttccacaaggagatcggttacaaggctcaattgcctgaggggcccgaagaggagcttagtgacagagaggctgagcgggaccttgaacaacaggaaattgacaactctgtcccgcttactgaagaagagcaagccgagaaagctcgtatgtcagaagaaggctttgcaacctggaaccgacgtgatttccagcaatttatcaatggatctgctaagtttggtcgcactgactacaagggtatcgctactgaggtggatagcaaggatcccaatgagatcaaagaatatgccgaagtcttctggcgccgatacaccgagatccaagactatccgaagtatctccgagtcatcgatcaaggtgaggagaaggtgcggaagatagatcatcagcggaagatgctccgcaagaagttggagatgtaccgcgtgccgctacagcagctcaagatcaactacaccgtgtccactaccaacaaaaaggtctacaccgaggacgaggaccgattcttgttaatcatgctggacaagtatggggttgagggtgaggatttgtacgaaaacattcgtgaagagattcgtgattcgcccttgttccgattcgatttcttcatgctgagtcggacacccgtggaaattggtcgccgctgcactactcttctgaacactgtggcgaaggagttcgaccccagtgagggcaagggccgtggtcgtgatcgtgatgaggaggaagagatagaagaagcaccccctgccaagaagaaggctaagaatggagctgctgtaagttttgtctgatcgattatctaatgttttgggttctaacttctttcacagccgaccaaacaggtcaaggccgtcaagggtggtagcaagactgcttctgccgccagctcccgggctcccagtgctcccgcaactaagtctaaaactcgcaggagataatcgtgtggatcgagtgtccacgggtgtgtacgttgctagtttgctacggttgttattggtgattcgggtattagggacggttttgttagggatcggcgcagatgatgttttaatgtacttttgtaattgaaatagagttacttgttctacttgcaaaggcttatcgtatattttcctgtacaatccctgcatattccgaaaacccccgcctgaccggagtccgcaacgccgtgcagatcggatgccaccctggcgccatatcacgctgctgaaacaacactaaccctgagtcgcctgcaatgacggaaattcaggtttctagacttggtctcaatctaaaaaatgcctagcctcctagctagacgtcgcaatacttaaaagccatgacgacgcttgtttcaagccccagttcattgcatgataacatcccatagtataaatacttaaggagaccccgcgctctagccatccatgctcaaatttctcaaatcaaaactatccaagtcccccaccatgcctagaatcaacctcatcgcgaacccgcactaccagaagtccggcacgaagtcgtacttgtacgctatgcgcaagtatcacttcacgccgactaaggaaggcccgtattttctcggtaccaggatggtgcaaagtggccgacagtacaccaataagcccgtgggaggccgtgctcggttgcagcaggtgctgcagaagaaggatgctactagcgatcaggttgggcaagtgagtgccaacgacgtgcagaatgactcgatgtatcttgcacaagttgctattggcacacctgcccagacgctcagtttggacttcgataccggatctgcggatctgtgggtaagtggatttctttcgctcttctccgtgcgatatgaacgttgctaagattgtctaggtctggtccacggagttgccgtctaagactttgtcggcgtacaaaaaccatacaatcttcgatccgaccaagtccagcacgtataaagagaaagaaggctcatcgtggcagatcaagtacggtgatggctcttctgcctctggctcggtcggcaacgataatgtcaacatcggtgggctggtggtcaaaggccaggccgttgagatcgctgatttattgtccgagcaatttgagcaaggtgctggggatgggttgctgggacttgcgttcggtaatatcaataccgtcaagcccgagcccgtcagcacgcctgtggagaatatgatttcgcagaccgatatcccgaagtcagccgagctcttcaccgcgaaattagggtcgtggagagactctgatgagccggataagggcgagtcattctatacttttggttatattgatcaggacacggtgaaggccgccgaggcagagatctactacactcccgtcgataacagccagggattctggatgttcgattctgcctcggcgacagtgaatgggaagtcgattgcccgggctggaaacaaggctattgcggatacagggactaccttggcgttggtggatgatgagacttgtcaggccatttatgatgctatcccgggggcagagtatgacaatgagagccagggatggatcttcccatccaacacaccggctaataagttgcctgttatatcttttgctgttggtgatacgcagtttgttgtgcaaaaggaagatcttggatttgctgaggctaagtctggttatgtctatggaggcatccagagtcgtggtactatgaccatggacatcctgggagataccttcctgaaggctatctatgcagtgagtgatatattcttggagttcacaatcgcacaagctaacgataattacaggtcttcgatgccggcaatcttcgcttcggtgctgtgcagcgaaaggagctgcatcagaatctctctgtgcctccggagtcaagctaggcatatgatatgtatcatgtaaacggactgtgaattactggagtctgtagacatatttattgtgagtcaaggaagataaattactacagaatgcacttgccgctatatgagaaactgctacgattcacgaatagaaaacatgagtgggttcctcgagctggtgtgattaaccctaattcaaaacagactcgaacaaagactcaaatcaaatactccaattatgtgctattgtacaaagatgtagtgtaaatgctagaatacatagttattacagtaaaatcaccacgttttctccttcttttccttcttggcgatctcaccgacagtcatgggggttcgcaagaacttctccatcaatagcgcggcggcgacactcacattcagactgtcgatgcgggcaggatccgattcaacgccgagaatagaactttgccgggcgccgggaatactgatgatcgcatctgcatgtgacttgatatgcgagctcaatccagtagcctcactgcccatcattatgacactaggcccagtagtggagggcagtttggccccgctttgatcaccatcggccgagatatgatccatgtgcacagagccaggaagtggtgcatctgcagcatagaatcgccacccgttttgctgggatcgctgaataaaatcaacttcatttgtcacatgaagaataggcatgttttctgctgcacccgcagaacatttgattgtgataggagacattggtgcggagttgcgaccagccagaacgattgcatcgacaccgaggaaatatgatgagcggatgatagcgcccatattaccggtatcaaccactccatccaatagcaagacaattgggtatctatggcgttgttcggcctcatgcggggacggagaaggatgatggatctggatacgatcatccgtgccatttactgcagcttcctcccgggtttgtggtgcaagctccgtccggaaatattcctcggagatagatggaacagccaggaggccacgcactggtaattttggtagaggagatgcctccaaaatgcacccattgtgagggcgtccagcactcatcttgtccatgagtcgatcccaccctgcaaatgccatttttactgcaatgttctttgacaatgctagtttgcggattgtgacctttgctgcacttagctcttcctccgtgctctgatagatatagagcttgtatagttgacgccgactgcagcgcagcgccgcctctaccgcactggtgccgtaaatgaactcagatgctggtgtggtgtaggggattgtatcgggcactttgacgttctctttcacccgctctggcatgctgcgcgtgactcggtgagccctaggtcttactggctctttctcccgtggttcatccatccaaggtctttctcgtcccgattgtgcgaatggactgtcttgtgttcgcgattggaatcgtgattggaatcgagattgatgttcacggggtagtcctcggaaatcaccagaacgaatgaactcatcctcgtcgaactcaaacttttcttcttttcggctttctcgtggtgattgagacttctcattccatggcgattgtcggcggtcatagtctttacgacctacaccgtccgatgtccagggcttttttgctccgtattctcgctcaccctggccatagcttcgacgaacaccggagttaaatcccgatctctcgggcttctgttctccatactgtcgtgctccatctgttcgacggtcattgaagttggtttggtctgatctctcgtatttttgctgcccatactgtcgggatccgttggtttgacggtcagcgaaattagattcgcctgatctctcatactgtcgcgccccgtatttcccctcgtattctcgttcgcgtttaggaaaacgagtgtcgttgccgcgccgattatctctgtccgcggtctgagatctgcgaataccttcgccaattgctgaattcaatgatgcatgccgaatcgccaagaccgtagaatgcgaggagcggatcactctagaaagaccatccaggcccgttcttgagatagtactgagcatcgcgacgaagttctggtctttgcagtttcgtccgtgcggctttggagaacttcgacatcgaattgcacgatcggtatgtaccctctgccgtacttatcgttatcggatctagacgcgcaacgcgaacttctcgtgtatgccacttaatcttcccacttagtcttctcgacttcgactttgtttttctctctcactcctcttcttcatccattcattcgttccgttctttatcaatttgaattcatctttcctttgagcatccagtccacgcaaagtttgctttttttttcccattgggatctgcaatcctatcatcaatcaaatagttatccattcactgcttagcttcagttcagttgacttttcttttctctttgtaggagccgcatgtgcggttcctacgccatcccaatttgctgattcttggtccaatcggaaaatcaccatgtctcaatctagagacaattctccaggctctgatagctctgatgatgctgatgctgtggctgcacaattgctagcacagttccagagcgctccctcttgtactcctcccaccatcccacctgagggtcctgaaaatgccctccagccagtgcaacatatcactagaaactcaaaagaatcaacaatgtcttttgagatcatcgtcccagtggttaacaaccctgatgactatgagtatttgcccggtcactttgaggttcatcgcattcttgcagtcgacatgcatgagccaaagctcattgtgagactcaaaagtggtgaagttcaaactgtaagcgaacacaagtaatcaatcaatcttaggcgccgttcaactgaccatgactttcactagatgaccaccaaagatttgaaaagcctcaagaacggacgaaaggctttgcgtgaattcaaccgtgactcacagagccctgaccccctcgcaatggaccactcccccatcccacatttcatttacgcgggtggagatggtcctgcggactatgattcagatatggactggggaattgcacgaaaccgccaacgacgcgcgccgttggtctcatacaacaatttcttccgcagtgatgatgaagaagatgaagacgactatcaaagccgccgtgaagagattgactcagaggagtccagtgatgaggatgaagatgaagatgatcctccaaccaaacgccgccaacgccgccctccgagaaggggtgcgcagaggggccgaaagcaacgtgatcgcgaatggtctgaacagtcttctgcctctgatacaggcaaacgagtatcatctcgcctgcgacagacccgtcgacgcaatatgaaagaacgcttcgaagacgacgaatattctgcggttgaacctgagcagcctaagcaccaaaagttctcgggtgcgagggagcagttccgtgaactaccacaggacaataaattcagattgtgccactcccagtcatgcacccaatgcggccatggagatcatgaccgtgaaaaggggtctttggtcttctgccaaggttgtaccgtgtcataccatcaaggttgtcttggcgatcgaaccagccgaaagcacttggtcaccaaggttgacgaaggggatttcattcttcaatgcagtcggtgtttggggatcaagcaccaagagcatgacatgaagcctcatttaggccattgtgccgtgtgtagagacgaaggacccatgtcgcagccgttgcgagagactctttcttcccagactgagcagcacttgcgggaagccaatggtggcatagatccgattactcccgtggatatgtccagtgtcaacaatgtcgataatatcctcatcagatgccttggtggcagccatagctgcaagcgagccttccatattcagcatctaccaaacacggcagaggagaaccttacccacattgatcctgataactggcaatgcgacgaatgctctaaatcacctcctggtgccaatccaatccaggtgatcgttgcttggaaaccaaggaatcccgaagtcaaagtcgtctcgcagttggttgagatgatcccagagatcgacaaactatatctcgtcaagtggcacaagctgtcctacttccgtgttacctgggtgactggagactgggtctgggccaggattcctgccagccagatgaaggcgtttctcaagtcagaaagatccaccaaaccgattatgacagtagctgaggctgtccccgaagacaatctgcgagtggacattgtttttgatgtggaatatcacaccgagcctaaatcccaggaggatcgagcaaacgccaagatggtcgaacgggcatacgtcaagtacaaagggttgtcatacgaagactcagtctgggaaattcccccagaacagactgacacagctcgttgggaggatttccagaccgctcttatcgacaaagtacgccaagagaatgtccacgtcccgaagccgaaagatcttcaaagccgtctcagagatgtccgtagagagaagtttgaccagagccttcttctgactgctcagcctgcgttggtgaccggtggtgagctcatggattatcagatggaaggcgtgaattggctgctgtacatgttcttcaagcaaaccaacgccattcttgctgacgatatgggcctcggaaagacaatccaggtcatcaccctattcgcggcattgatcgataagctagactgttttccattcttggtcgttgttccaaatgcgactgtgccaaactggcgccgagagatcaagagctggtcgccacacatccgggttgtcacctattatgggagtgccttcgctcgcgagatggccagggaccatgagatgtttgacgagaatggcactctatgttgccatgtggttattgcttcgtatgagagcatggcagacgatggggctaagcgagtcttgtccagtatcaattgggctggcttggtggttgatgaaggtcagcgcctcaagaatgacaagacccagctctatgagcgtcttcgtcgcatgaaattcggtttcaagttgctgctcactggtacaccgcttcaaaataatatcagagagctcttcaacttggttcagttcatcgacccaacttacaatgcggaggagttggaggccaaatacgcaggagccctcgacagggaagcgattcgcgagctccacgacatgattcggccatgtctcctgcgtcgaacaaaggcagaggttctgccgttcctacccccgatggtgcaaatcatcattccagtttcgatgtctgttgtgcagaagaagctgtacaaatcgatccttcaaaagaacccgcagcttctcaaggctatttgcaagaagcaagtcgggcagttgaagaaagcagagcgccataatttgaacaatatcctaatgcagctgcgcaaatgtctttgtcacccgttcatttataaccgggacatcgaagagcagactctggactctcagctttcccatcggcgtttggtcgaagcatccgggaagcttacgttgctgaacttgatgttaccgcgacttcgagagcgtggacaccgcgtcctcatcttcagtcaatttttagagaacctcgacattgttgaagacttcctcactggactgggactccagtactgtcgcctggatggaaacttatcctcgagggaaaaacagcaacagatcgaccagtttaacgcgccgaaatcccaattctttgcctttttgctttcgacgcggtccggtggtgtcggaattaacctcgccactgccgatacggtcatcatcatggatccggatttcaatccaaaacaagacatgcaggctctgtcgcgtgctcatcgaatcgggcaaaagaatacagtccttgttttccacctggtagtgcgcgcgtcagtggaggaaaaaatcatgcagaaaggtaaaaccaagatggcactcgatcacgtacttatcgatcgcatcgaggccgatgaagataaagaagacttagagtccatcctcaagcatggtgcggaggcactgttcaatgacgatgactcggcagacattacttacgatgtggactccattgacaagctgttggaccgtagccaggctgagcaggtcaagaaaattgccagcgagggaagttcggaccagaatgagcagacgcagttcaatttcgcccgggtgtggcaaaaggatcgaggtagccttgaagaagtgactgagactgaggacacgcctgtggatgttacggcgtgggagaagattctgcaggagcgtgagcgtgaagcgcaggaggaagctaaccgtcaagctgaaggtcttgggcgcggtaaaagaaagcgcggcacaccccgctacaataacaatattgttatcgaaggagttgacgacgatgagaatcttagcccccgaaagccgcctagcaagatgcgaaagcgtgcagctgacaatgacgatgagttccaacagccagaggatgatggtgatgagaccgagttcgagtccgatcacggcgctgagccaatggaccttacatacgatggagctgagccaatggacaccgcaaatgacggcgacaggactgaggcacaaatgggcactacaaatgttgtcacacctggtcttcatgtaggtgcaggacagcaaggtgagatctaatccatattccatgcgtatcctagttattgcttttttttgttttttttttttgattttaataccctatcattccgtattgccgtgtaaagacacagttcgttaactgtacatgattctcagtcgcacgcgcgttccgttgtgttaattccccgcccccagtgacctaccaccttgatatccgtccttgtgtggcgtgcaaacaacgccacatccctgggcagtgcccactccgttcggctggtgtcgagttctgtggcctctgcggcctggcgcactggggtggccgccggatctgcccccacctgcagtcacgggtgcaggtcagccttatgctggatacgctggaagagagcccggaggacccggccctcatccttaaggcgaaaaaataccttcggggtgttctcaaatcaatggggcagactgcccggagcaaggcttcgtctgccactcaggcggagtctcggattttcacctcgccctcagttagcggggtgagccgtgcccctaccgatttaacaggggcaagtactgagtcgaaagactaaataatgtctactgccacggccggccccagtaggggcgtcttttgatcactttgtgattaccgtcagagatgagccgcggctcccctctttctttctctgatttttggtttgttttgttttgtttgtgtacttgcattgggagagtttggtatgtctcccaaaaaaagggggggttgttctgagcgttatgagcgaaagatacccagctttgttttgatccagctttgttttgatacattgagtaaattgagagaatcaatatgaagttgtatgattatagtattgcatgttgtactccgtagaacaagtaggtccactctgatatgcgatggtatcgcaggaaagtagagagatcgatgtttttagttatttgcatccatttcttttgtttctatggacctttgagcaaatactttactagataggatagtttccgatatcaatgacgactagaaagcagtccaaatcaggcaaacatttaaatctcaccatataagccgtagggatttttagtggtgacacgcaaaatctttaaataaacaaagaggtgcatacggacatccttcttcatcactccacatgtccctcttccctgcctccaccgctactgaattcaaacaagaaccatcttactaggatactgatatgccattagccttcaagatccagccaaatgggccgacggcaaatttccaccactctgactctaagcgcagtctagtcccctacacatgttccgagatcccttgacacaaagccaaaaggccagctctccatcgtatgtttcaggcaatggggagagtaactaaggcctgtcaaaggccactgaattgtcatattatccatgggaactattccagttgtggccagtgtctggcagcattccgcatgttttctagtaaaattacactggtctcgacaactacaacccagctagcttggtgctagctccatctaatctaacaagagacctgctgcaactgaagcatgagctgaacaatgacttggatgtgggtgaggtcgtcgaagaaaagaaacggatcaacagcagaagaacacagacagaatcaggttgaggaatcgagaacactggcggaagaacgcagagcgactcagctcgagatctcgagaatggcgacagaaaaacgccgacagaatcaagtcaagaaagcgagaatgctaccagaagaacgcttcggtacacaatcaaaataacgcgggggaaatccagccaagatgataatggagacatgaaatgaaaggaagtatctcaatgcaggaattagacaaccagttcaagcaagaggaccggctgtcaagtccctgggatgggttgtagaagtggagcataccatggccaaggtcatccatcaggatagccttggcagaattgcagttgataaattttttcgtttcatttgttttgtttctatacaagggtttatttggcttggaatcttacgctagatttggtggatttgcaacgttcggagattttattctgcagccaatgattgttggcttcggaaaatttaggttaagctaagccacccgtacccgagccgcattgtctattgtgacaacatgcaacatgacgggaaagaagaacagcaccagatgatatttcttattggattctttgggctcatgatcaatttcgactttgtgcctctagatgtgtttataggctacttgcaggttagatgggttgtggtagttgtggtgaccgcccgaaagcactttgtcctattttcaagcaagcaatacaagttttccttaatgtgaaaaagaatgcctagtagcttttctagagtactgaaagtaagatgtatagttccaaggtaataaatatagttggcataaggtggaaagggacgctacgataagtcgtaccgggtcgaagaggtgtatatttacgagacaacataactcacacagacctagacgaaccaagagactaaatcattgtgtcattctcatatagtaagacttcaatctttgtttgtactagtatattcttcgtgtcccaccctctacccatagaaacaatacaaaggacatgagtattggtggagccttaagcatatgtagcattgatataagcacattgaaggcaaggaacatgcagaagcagcatggaaggtcagatttagaattggactaagtatgttctgcaggtagccggccaaccttgccaagacacacgtccacgatgcctttacgcgccaaatgtaacagtcgccgaatgatacacagcttattcgtgcctttaattggtctattcctacactattctagatctatctgctctttgatatgcatagaatgatgtttgcatgccacctgcaacattgtaccctcatttcccggtctgatggaccagggcgtctttgtcatggcgaccttattgtgagcttaaacacagatagatcccattgtgtattcagtatatccgatgtatctagaatagtatagttcattgagtagatctaattcatatatctctttgatatgtagatagttagcgcaaggcaggcttcatgagctggggctctccaatatatgagattgtgttttcccgaatctcagtttcccatcccatcttcccattttgctattgtcctgtttgtcaactctagggctatcaccctgtcacctgtcacctgtcacctccccccccttctcgcacaaacacttcttcccacctattttcttcatccctcttacctcttcctttctgtaccatacagaccattcttactgcacaatcctatccaccccagtctctcatctttattcttgagcaagatttgccttttgtcaagatggcggctcctggtcgtcctcaatttttctgcacccgtcctgatgggtccttgactcctctggtagcagttgatgagctacccactaacgtcaccatccatggtgcccctcgtatcatcactgctggggagacccagggtatgaccagctgtggcctggctgcccaacgtcccgaaccttggtctgtcgagggacttcccaagtcctctgagggtctgcctgatatgcacagcctcttgctgcagcttatcaccgataagaatgtccctgaggacatgcaggcatctgccaaagccattctcttcaagggaatcgacaacggacgtgtcggtcaaggcactccttccaacggactttctccaatggcgccgacattccagacaaagaacaaccacgtcggcaacaagcatgtatggccaagtgttcctgtcatgtcatggtccattatttaaccctttcaacataggctccgacttccaagaaggaatactgctcgtactggattcgccacggtgaatgcgattactcccagcaaggcaagttgaccacatgacggagactctatgaggccttgactgacccgatgtcacaggttgcttgtacaaacatgaaatgcccaatgagcaggagttgattgagaaacttgggctgcgtgatattccccgctggtaccgcgagaagttcaacgtaaccagccttttgcacccaaatcgtaatcgcccccagctgaccattgcggatcagcaaccccccatgcgggccctgccgtcctcggcttcgcctactgacgagatcaacgccgacaaggcgtccaatgtctgtgaaaccccgaaattgagcaagtctgccgagttcaccaagtcccctccccgtggaccatccaaccgtggaggtcacaacgggtttggtaaccgcggtggccgaaacggggctcccaatggacatcatgtcagcaactggaaaggctcccaccgtggtggccgtaaccgaaacatgggctcaactcgtcacggtatgatgagcgagcgtgacagcgatcgcagcggcgagtgttccccccgcgcctcagctatcgcccgttatgacactcaggcatttggccgcgatcaagttcgcacccctatccccgcgctgcgcagcatgatcactatcgataccgaccaacgtcccaacgaatgtcttttggatgacggtaactttcaaacccggaacctctaccggaatatcaatagcctgaccgagtgtaatgaagataccttcgaagacgccctgaacaagccgattgagcccaaccaccgtgtccagtcctcccacgtgtaccagcacgactcgaacacttcttccgatggtggtgtcatgttccccaagaaccatgccgcgtgggattcgaactttggttcattcgctcacgttgatatccctgctcgcaagcagtcggagtcgaacagctctcgtgccaccgtccagagggattacggatcttccactccccgcattggagatcttcagctcaacgacaatgtgcccctgagctcgaatgacacccgtgtcacctggggtcccattggaggtcccattctcaagcgtaccagccctcctctcgagaacatctcgcacatgtttggaccttactccaacagtctccgccgcagcaactaattggattgtctgaaacaattcagtcaggcatgcttggcctggagtggtactcatgatttcatgatgccgctccctgattgtttcttcaggcgtatgagatctggtgcttggatgttgttttctttcgatgtcgatctaccggataattatgccatatcataccacaggctatacccaagcaaatggaatagtcatgacgacaatcctcatggtggagaggcagttgtggtcaattttttcgtttctttattttctttatttgatttttattgtttctttgcgtggcaccgttcaagcgtttcaagcgttcaaaatatggaaaaaaaatgtgcccatatggagttgtgatttttgcgtgttttgcttctattcttatttacctggaaccgcagcggggccttgttccatcatggacgggatgttgttgttttacagaggaactgggctatgaccagttatcaatgcaatgttttattgccatttcggttctctagtagtctctacgcagttgcgagtaaagtagagatctaagttgtactcgctggtaagtcaagcggcaaactacaaatggaacaacagcgagccgccaatgcatggaataaaatgactatagtacattcgaaagaaaaatgccaaaaatcctgaaatatgcgcccgcgcctcgcaaatgtttgacaacagcttctcaaacacacccaatatacagttgacgacatccattaccggcgagccacctttttccgagcgccaaccttgacagcaacgcgctcccgctcgtcagcggccttgacctggagagcagggttgagtgaaggcagagtcttgatagcctcggagacaaccgaattaccgtccacaagggcagctcgctcttcctcggcaactagacgctccttgcgccgcgcagccagctgactccgacgggtctcggtcatgttccaggattcggggaattgcagcttggtcttgggcctgtggtggcggaggtcgagcgggacatcggcgaaggagtcgccttccttggcctccttgatcatcgagttaacgagatctgccaggtagcgcttgttctgggcgcgcgagccaaacttctcgctcgacatgcggatgatatcggtctgcgggttgtagcgcggaccggccagcttgaggaatgtttggcgctgggcttcggtgagatacttgggagtcaaatcttgggagacaagctccacaacgaccttcggctctgctgggtgctgttcacccatgtaggtagtgtagcggaagcgcagaatgtgggtggagggaggcagggtgaatggtttggcgagctctagttcaacgttagtggaaagactagtccgatgagcaattgatcttactgctcagcattggcatgtcccatgcggtaatgcgggcatattctctcatttcacggtgcaattccatctctgcatgtgctagggacgtgatttcgtcgtcattgatttcctcatctccatcctcgagtgtgttcaccaactcgtcaggctcgtcttcagcccagaaaccagcccgacggggccgaggctcttcgaatcggagatcttcttccttatcaatccttagcatgctctgctcgatttcctcaaaggccgcggcgcgcttcctggggtcgttgaattcggcaaccatgcggatgttctgttcgtcgaatgccgcgcgctcctcgggagacatcatatcgtacattgagcgctgctccttgggaaggagatcgactgagtactcaggcattggggggaaatcctccggtctgagttccttcggcggaggaggaatcacggggtcatcctggacgcgattgagcggcgaggcggagaagtaccgagcagatggggcgatgaggcccctccgagccagatgcccgaccgggcgagtcagtaaccgagctgctgaagccattgttgagggtatagcgtgggtagggacaggatctcaatcacgatgttttccgcttccacttttgcgaggttcaccgccgtacgctattccagattaggactagtgtagttcgttctcacgtgatagcatggtatatgctgatctttggattggacaattcccttatatggagatgatgattgactacgagagaacttttcaagactgattctctgcttacttcgatctaataacatcgccactatgaagttatgttttgtgactgtgggggccacggcttcctttcagaaactacttgaacaagtacttaattcacaatttctcgagatcctagccaaacacggctacacccatcttcttgttcagtacggtaaagatggccagcagattttccaaaacttcgtcgatagtgaccaacccgaccacggtatcaccctagggggcttcgacttccagccgagcatcgatgcccaaatgatgatgaccgtggaaagagaggctctggaccaaaagcgcggcttgatcatttgtcacgctggtatgaaaatcaatattcgcctgtccaatatggatgccctgatccacttaccatctcacaggaactgggactattctggcaggacttcgcttgggcgtgcctttgattgtggtccctaatccagaccttgccgataatcatcaacaggaactagccgatgagctggaggaagggaactacgtaattagtagttctgtcgagtaaataacctatcctcctttgtcttggccagtctggctaacctctgacagggatgtgggcagtgcgattagcagagcagagactcagaaagccgaagtattgtctatgacacctggaaatacaactcttgcggaaagtatgtctgatgatttgtgctttttggactaaaggaatctctggtggcctctttccgccaacactttttgttgcctggatgggcttgagcgctggcttttatcacgaattacgacgctgcatgaaaacaaaatgggaattaatcaagcaattggtccgagttggtctggtctatggagttgagaggagacctcatgatatacacgaagagaatcaattacttctcgacccattaaccactaccgattagcttttagtacaaatatcggcccatgtgtattatcgcactatatatcgcactataatcagtaaaatatttaatatctgtaactcgaattatcgttgaagtccaattcaccaggcgcggactagtggcccaagctccttgttgacaattcccgatttgcggatttgcggtttcgcgtccactcctgaatcgacaacatcaacgcccagccaccgaaacactatatgcgccttcaatcaacatccactccgttgatcctccgagtctcccattctaggccgagaggccgtctgtacccgcgcgtgtccttgcccgacctcacctcccatccccaacactccccgcaatggctgaggcaactctccacaacgtgccgattgtcatcgacaacggcagtggcacaatccgagcaggctttgccggcgaggaaattccatcatgttatttcccgtcattcgtcggccggcccaagcacccacgggtgatggccggcggcctggaaggagactcattcatcgggtcccgtgcacaagaactccgcggactgttgaagatcaggtatcctctggaacacggcattgtcacgaattgggaagatatggaatcgatttggcactacgtctacgaaaacgagctcaagaccctccccgaagaacaccccgtcctcctcacggagccgccgctgaaccctcgcgccaaccgtgatatcgcagcccagcttatgtttgaggcttttaacgtgccggccctgtacatgtcgatccaggctgtgttgtcgctgtatgcgtctggtcggactacgggtgtggttttggattctggggatggtgtttcccacgcggtgcctgttttcgagggtttcgctattccgaacagtattcgcagaattgatgttgctggtcgtgatgttacggaacagatgcagttgctgctgcgaaaggctggacatgtgctgcacactagtgctgagaaggaggtggtacggatgatcaaggagaaggtctgttatgtgtcgctggatccgaagcgggaagagaaggagtggatgaacagctaccacaagtctgatgctaaagcaatggactatgttcttccggatggtcacaagatcaaggtatgtctacggaaccgttcgtcttgggttatactaatgggcttgtctagatcggccaagaacgttaccgtgcgcctgagatcctcttcgatcccgagctcattggcctcgagtatcccggtgtgcatcagatcgtgcaggacgccatcacccgcacagatctcgacctgcgaaaatcgctatacctcaatattgtgctttctggcggttcaacactgtgcaagaacttccctgatcggttgatgcgcgagatcaaaaaactagccgtcgaggacatgaagatccgcatttccgcgcctgccgagcggaagtacaccacgtggattggtggtagcattcttgccgggctgagcacgtttagaaaggtatgttaatccctcatgtctacttcatcattgctgactaaatactgtctagatgtgggtaagcgcagacgaatggcacgaggatcccgaggtgatccacaagcgatttgcataaaggcctcgtctctgacgaagtctttgatatcatggtggccttctaccgagtcactccggatcacatcactgcctccaccgcgatcctaggcaccatctcccattccataacaaacaacacaagaaacagatcttgtcactggtcgatcatcatgcaattggcagtgcataagaagtgatcgaccaacatcacaatccgagtcgtatcctgactcttgataccccagcttcaattttcttccagcttatgtcgtctggcattggctctgactttgcaaatacagtctctgcgtcttggggatggttctactctagacataatttactcggacatactacagttctcgtcatggattccctgcgtagattgattagatccggtagatatatttgcattctacttggaatatttagtgcagtggcagtcatctgattcattccacctctgactatgggtaaataatgccgatgttcattctccaattctccttctcctattcatagttatgactcaactacatgtagtcatagtctcatagattggtaaccaaccaagtacccgaagtacccggatggaagtcatgagtaagccaaggaggcaatttctattttaaacaaaggatcctattctattaacggttgcacgtcttaatagagaacaaatatacaggcaaactatgaaaaagaacacgcatgtcgccacgtaccaaaacacaaagtccaaaatatcgaaaccgaaagcgaatatcgaaaccgaaagcgaaatccacatcaaccgaataataagaacaaagagaatggaatattctagaccggagatcccaaataatactagtttctacgctgtacagacagacacctgtggatatccccaaacatcatgtccggctgtcatcgcctagcagcgggtacgacattacacctgacgtgcgagtatattcgccataggtggaaccgcacccggcaataccacaacaagcacgtcttgaaagtacggaatctacggctacaatgatgtaattggagatatttttgtttttttggagacgtgtaatccagccagggaagacaagaaccccaagcatgtattgtattttgtatttggtattgtgatttgtttagacccatggctaggaagtagtagccctcggaatggcgcaatatggggggaatattgttgaaagcagcaaagaaatacagaaaattgcgacacagagtagagtaagatggagcaatgggaaatgggtaatgggaaatgaaaacggaactccggaatgatgcaaccagacaagtgttgttcgatggcgcgatcttgggtatgttgaatttgagactactccgtagaagaataggacccggtttccagaacctggcgttgatgcagggtggtttggctctaggcgcaaatgaaccacaaagaacaaagaaaacgccggtttgcccatggttgagagtgaagaggttggagtttcatgcggaaacaaagagatggtgagggaattcgactcggggtatttccatagacagcagaaagaaacatgacatgtagtagtagagggtattgtcatcctcgatgtttcaatccggtccgatggaaacccatattaaaaaatgagaatgagcatgttaaagagagaaaaggcaaagaactttttttgtcgttatgtcgttggtgtaggatgtagaaaagatatgctctaggcagtacccttcagcttgccccagcccttctcgagaccacgacgggccatgtcacgagcccgatctgccacggagccagtgctggagttggtagccgtactaccagccgagtacttgcgagtcagaatagaattgctgcagtcgtcgcggaagatggtgttgccggcaccgccacggccgacgtggtagacgggggcagcctggcgcaggtcacgctcgagctcttcgtcgaagctgaagatggcgcgctcgctgctgctgtggatgttgccagcaccgccacggccggagacaaagctggttggcaggcgcgagtcgagacgggcgagagaggctggtccactggcgctgcgcgagtcggtggtcttggtgttcttgaggttgacgacgtttccacatccgccacggccggtgtagactgctgggcgaccggcgtgggggacagatgggtgcggctcaacgacgcggtaatttgaagaaggcatgttgatttgatgtatggtggttggggaattagaagtagatgtagatgtgatgtagatgggatgtagatgtatgaacagtctatgctgtgaagggtattgaaacttccatgaaggatttgcaagatgtgtggatatggctaacaaaccgcggggccctgatgttatatagtcccagggcccttttttgacattttcacgtttttggagtcatttccagatccaggcacgacatccagtcacaaggccgtgtgggggctttttgtttttttcttttttctttttgaattttcattttgaattttcatttatccctttccttcgtcgtcatcagcctaaaccagccagggatatttcccctttcgacccccctgtgatctggtgctacaatatgattggctgccagtctcccccagacaccctaactctggctgctttaccagctgtcctctgggcaacccagtcatctgactggggcggctccaccaatggtgagtggcaagacgtaacaaaaactggctgggcagccaatcagcatttccattacccccaggaaatgcagaaaacctctcatttcaggatcaccgagtgtccagatcctattgctttccaatgtcgagctcacgttgttctgggaatcacaccgcaacagatgggccatttcacgatcacgtcaggtgttgcgccattgggcattagatacaattgcatacatagaacatggtatacatcgataattgtatacattggataggatggaggattgtagtagctagtagaagtagctggttgaacctgaatattaccaatactcacgatgtattataaaatacataccaagagaaaaggtatttttctgctccagcaattgcatcatttaccagcccgtgtccactttctatttcagaacatcaggggctttgtgcaacacatttattatttctgcatgtccagctgatggttgcacaggtatataatgtaagttgatatatgtatacagcatatactccgtatactaatagtagttagttataactatatggtcattaactatagtaaaagatgaatacttaagttgccgatgaggaattatgctaaattgcacatctattgtagatcgcctgtacgatgactccatcgcgctggcaaatttgcgggatattctcccttggccccgtagatccaagtctagtcggctaggcttgcacggtacctgcccaggaggtgtcttccataattgactcaccgtaagtgccgagtaccctgcgcactgcgcacgcactgtgcacgtaagaatagtgtcaggccaacccctcggcagtcgtccagctgagccgaggagtccgagacagaaaagggaaagtgccgttccccagacaaaacacaaaatgacgttgcaaaagaaaaaagaaaagaaaagaaagaaaactcttcctccctcatgattggctgaattatccgagcggccagggaaccaaatcaccgcccttccaagattcgatgtctgtgcgtttcgcatttccccagattttcctttccccaactttttctgcgttggaccgagtcatgcgtctcggagcgtgatctttccagccctggatgccgaggaacccccgcttaaggggtaggatgcagaggaatgattccgcgatctcgtgggggcttggaatacgtgtctggacgtgacacggcgcttcggagtaggattgtcaggtgttaggttcctagaataatgtgccgatctcccacagggttagcgcctgacttgataatcttcaggggaacattccattgcccctcacatagaacacaatcctgttatgtcgagaagagaattactgtacagaatacacaccctcaaatgactagcgacacacattataaacgattgggtaaggccgttcttagtaggcgctttttcacaatgtaattgatctcacagccactaaatactgtaagccaccctcaccgtcagccacagtaaaggtctgtcacatgatgccgccggctagtttcataaagctactcttggacatagtcaacattgcctagaaatgacacccgaggaatgatcaaatccaaaatagtgatttcttcttttgtaaattcagtctacctgtcttagttttttttttactcccaccgttttgcttcagaccgacggagtaataaccgcactctccacgctagacctacccaccaggtccgcaaacatagacggccgagccagcaaatcccgcggaggcccatactcagccaacctcccctgatccaacaccgcaaccacgtccgaatccataatcgtatccaaccgatgagcaacggtaagcaccgtgtagtcctggaactcatcccgaatgatcccttgcatgacctgatccgtctcggcgtcgacgttgcttgttgcttcgtcgaggatcagaatcttccctgagcgcagcatcgtgcgagctagacagaatagttgctgctctccctgtgacaggggctgctccttcatttgtgcgtctaatccaccacgcttctcgatggcgtcccaaacctttgttttcttgagagcgttgatgatagcttcgtcgggtaacttgttgctggggtcgacgttgattcgaacggattcgctcaagaagaatggctcttgtgggatggcgacgagacgactgcggactagctcccgtggcagggtttgtaggtcgtatccgtcaattgcaatacttccactgtcaaggtccaataggcggagtaaggatagcagaagtgagctcttgccgctaaattatcacctattgtcagtaaacaggagattcctggggaaagaagatacccaccttccggtccgcccacagatgcctactttctggccaggcagtatagacatggagatcttcttcagagctgggatggaggggctaagtactggtcagtgtcgtccatagtaaccaatcaaacctagcttacctgtaagaagccgaaatatccttcaattcaatagcaccatgctccggccatgtatccgggggagtagtatcttccccttcctgatactcaggtttgacagtttgctccaaattcttcaatctcgcaatcgctcccagcgaggtctctaattgtgtccagctgtcaatcaaaacagccagagcttggttgaatccgagaacattattcagtgccaggccgatagtgcccgcactagtcatatgcggcagtaagaccgccagggcaatgactacaacgccaactgccgcaacaaggagatcgagaacaaggttgagccagcattggatgcagtacatcaagtagaacggcctctgggtggtgtccagcagcttggtgttggtctcctggaatttctcctgccagccaaacgcacgaagtgtggacaggccctctagggtctccaggaaatgactgtacagcgggctccgggactcgagatcgaggaatcgcagttggcgcgacgtgcggaggtagaaccgctgcagccagtacacggtgacggcacagattggaatacaaacggacatgtaagatgagcccatcgcgataagtgctgtctgggaaaggatttggaaaatctctgtattctggattagcttacctccatgcttataccaccctggagagatacttacggacaaccatgcgaattagacaaagaggcagtacccggtcaatcaaaccgatgtcctggctgaacctgtgtcatgttagaatcgagtcatctactactttcagaggccttactggttcagtatcacaccactatcggtttttgcaaagaaagataaaggcgcgctatgcaagattagcagttgtcagctttaagaaagaccttcgcccttacccaacagcaacccgcaaaaggattcgatgaagattgagagaggagattggcgacatccagatcagagcccacctgcaccaattgttagactttcatctcaatttccttttgcgaaacgacacataccagaaggttagacagcgggaaagcatagcggcaacagccagaacaacatagacactcatatattttccaatagaacctccgttcacatttgtccaccattgaagccagatctctgtatactgttagcatccgagtcggttcatctagaacagttcgactgaactcacgctggaaggtggttgcaaaggtaaacaacgcagtacaagctatgaagccaaatgtccgaggccagccaaaagatcggaagtagtacgcatagactgccatgtcaccagtttggcgtgttagatctgcatcatctggtcccggcgccttgattttcggccgtggtttggaggatggctggggtgcactggcgacgtcctctgcactgaggacctcctcacagtcggaggtcgctatatctgttttctttttctggatgtcctggccgctcaaaacctctcggacctttccctcccgagttagaacgataacctggtcggcgatgttgagatggcgcactggaaatgattagttacgtcttcaattataggaccgattgtggtacataccggagtgagtcaccaggaggatagtagtctgcaaccgccgaagtaatccttgctcgccgaataagcggtctacgaccagtgcttcggtcttctgatccagggcactcagaacatcatccagtaaaataatactgcgtctagcgtagaccgctcgagcaagcgcctacaaaaaagaattagtggttggtaaacgttgagtaggatagaagctagttgaacgtactactctctgcttttggccgccgctaagggttactcctcggctcccaactacagtctgttcggcatgagggagctgcgacaggtcttcttccagagcacaggcatgaatggtagtctgaaaccatacatgatcaattttttcctcgtcgcaaaacccgcagataacatctttgatggtaccattgggcaaccaggggctctgagcacaaaaggcaatgtttttggtggagacggcaatagtgcctgcgtcgcagggtagttctcccaagaccgctcggagcagtgtcgattttccgcagccgacgggtcccacaaccagcgtgagggagccttctggacagtccatggatacctgacttatagctgggtcgacggttggtgcaggccggatcgtcacttgctgaaccttaatggtaggggtcgaatgggtagtagtctctggcactttctcaccctcacgcattgtcccgttgggatggctaaggctcacctctaagcttgagtcaccactgcgagaaccaccgagtccagtgactccgcgactatccgaacctgctggagcacgaaggaatttctggagccgatcaaagcagcctttcatggctgcagactcattaatcgcaaacataaggagggaggcgggttgggtgaccaaagttataatggagagagacgtaaaagcctggttcgtggacaggctatcggtaccgcgagcagtggcttgtgccacaaacaccacgaacgtcaggacgggggcgaatatcaacggggcagaagcaatggtgttcgtccacaatgccagccagcgaaatcccatggcggactggatttccttgcggcggtactcctgcacgctactctccaccacttcagtcatgcccatgattttcatgctcttcatcgaacccagcatagatgccgtgacggcaatgcgtttctgcacagccgcgttccagaccttttgctttccgacaattaatttggaaagttgcgagttggcaaaggtgcacactgcggtcggttagtgttgtttcaaacgttaataatctacaaggataggagctatcaacataccgacaatcagtccaatgggcagcacggccaccgcgcccaattgatcaaccagcagccacatgccgattgcaatctccgtgatgcgtgcccatacctcatggatattttgtaatcccacggtgacacgatcgatgtccgtgctcataagcgtaagcgcggccgattcatcgtacgagtcaggcatctgcaatgtctgactgtatacgagactgaccaaagagccccgggccattgcaatcattctgtacatttcacgcttgtagaggacggtagtgatctatcgaaactcagcatccaggatctcccacaggtcgagaggggtgcaggaacgacttacggcaatactgatgtagactaggaaagcagccgccataagccctaaggcatggctgcggagttgttcggaagccggggcttcgacaaaactgataacacggctgatcaggaatggttgggcgtatgtgaagccgatcttggccagtcgcggtccgacggccgacaagagggcccatcgcatgcatgagatagtggccatgatcaacgcgtagggtgaattggagtgcgctatagttttcgttagccaaatgatcaccgatggggagcattcaagtacctcgacgggcccagctggcttgcatccgttctcgaagatggaaggtagcgagtttgctgtccatcgagaaaagatcctcgattgatagcaaacgggcaaatcccctgaagaacagcggattgagccaccagaatagggtgcgcgcccacacatttgctgtcgcttcgggaggatggtggcgatacggcagcctgagttcatggatcttactctgtgcctcgaacatgagcagtattaccttgagacccgtcgctgcagtaaataccgctgccatgggcgtctggtcccccatcaggaagagtgttcgcgactgggggatatccaggacgagcgaagccaagagaaagactcccaagagggtggaaggccgaatggaacgagtatgctccatgtaggaaagcagacagatagacagcgcatcgaccaacgacagggcggcagccgggatggtcgcgaccgtttggacctgtggatttcgaacccataacactagtaaggcgacttggacaccaaacagagcaacagcggctagtagcttgctcgagcacgccagggagaaggagacattggtcttaaggctggtgcgagacagccagtataatcggaagggaacgataaggagcagcagggccgaaggagcaatagacaggatggattgttcgaaggtgagggtgaaatcaaagcctccgcggcaccgggcatcgatcgaggggccaaaatggagatcagcagcctgtgggcagagatcccaagtatcggaagcattcagcgccatggtctatttctgatgaaataagaaccatggactgaaagaaagaagggttgaattcacgcgagaacggagagaacacagatttaggggaagtgaaacaaagagacgcgtgcttacagggtaggtggaactagtatctactactacgtctgctatttatttagtaaaaactactaattctgtcttattctttatcgacatagagtcaaaattaacaaaaggtcagtataaagctagtaaattatatatactagaatgctaacagacctttaggttttgctatattggaaaccttctcaaggtcattgtcggcccgttgtcatcgcctctactatacagtgtactgcctcacgagaccatgccactaccgtgcagtccgagccaatagccatcgttggggctgtagatcccccgggcagagcaaatcgacgtcaaagctctgggagctaaggagtccgacgggaacagtttttagcttctaccgatattaaggcaccgcgttcgccattcctaccatgttttgacgcgcaacttgtcggaataaaacctactgaagctaattgtattggccctcagtatcgtctacgccttgaggccgtctagaatcggttaactccgttggttgacggctgagacagcggtctatgttgggttgatgtggggggaatatgatcggccgggacctagactccttccctatgtagtacttccggaagcatcgaagcatctcgaaccgtctcttatttctttgactggcatggttgtagacttagccgacatctatcatctatgactaatttcttagcagttcaaaaactaagggcagaaaaggtcatatgatggttatgtcattgatgggaatagttaccagatcagaatatatattcaactaggccaaattgaactggtgtgtagatagggaaatagtcggtttgggggtgtacagtagttctcttctaatttacatcttagagccctccaactcctccaagcggtgcatatccatatccttctccaacagaggaatgacgtaggggtcgaaagtcttccagtaagggttgttgaggtggtactgctgcgacgattcctgggcgtagcgctcgacgatggtgaaatcctgcttgtcgaagacggactgcgacacaaaccaggagagggtttccttgtcgttcgagtagacgttggaagcttcaacgagcttggccttgagcttggagatggactcttcgtccggcttggcacggaggtctacgactgtcagcgttgggaatagcaagacgaggggtatcacatacggacgacgattgtgtaaaccatgattgtttagaggtgaatgatagagggattgaggggcaatggacttggaggggaataactacttttacgaatttagtcatcggtgaattatgcagaatggaaatctccgaaatttacccggccgggtcttgatgtcttgataagcttatttccattccagtatctccaccaagctccaacgatcatgaggtatttcttggacagaaagaatcctaaggagacatgcccagtttcaattctcagtcctgtgagccaacctagcaagcaggctcatcacctgcgttgccaaatccggacacttaagatcggatgtcgtcacgagcctcactgccaggaaccaccttgctaaccatagcgtccgcgacacactgcatccactggtagggctcatcggcacgaagacggctggagaacgagcccttggccttcatagcgagaatggtagtcacaaactgcaccaaacgcgagacgtagctcgaattgagtctctccgcgccggtgagatcaatgatgacctcctgcacattgtgtcccgccgggatagcgcgacaagcagccctccaatccaagttgagggtgatgaactccaagccctcggggtgggtcacgtagtcgatgaagacgccgtccatgctcgggtacgggaacggcagtgccatgaagaactcgcggacctcggtcggcttgttgcgagacaggcggcagtatccgtcgccggacaggccgcggaggctcggctcggggaatcgtctgccgatgaaccggtgcaggggggcgaggcggagcttggtcgcggttgcgttcggtgcggtgctggcgaggtagacctcgaataccttggggtcttcgaagacgaaggttgggctcgtgacataggcagggagctcggtgagccgcactgacatgcgcagggtggaggcgccgatcgggctggccacgaggtcgccgttgatgagggagatcagcagctcggtgttcaccgtgaggatcttcatcccgttggcgagttggtcaatgttcattgtggcggttgctatttgaaggaaagtgatttgggaacttggtttagggaactggttgatggaatgaaggaaggactaatgtaatgcgacaggtcgtgtgaaatttatggcgatgtgaatgtgtgacgacgtaagcgtttgatgcgttgtgaacgtttgatctgatgtatacgttgtcgcgatgtctactgtaggtgcacttcctgaagagtctttccaatttgcgaaagagcgaacaaatatgaatagcgatctacctgacttcattagatgttaatgacattctattccccttgcaatatcccaacctcaggaacttccaagctgaccatctgacacccagtgagaaccaccagcacatcggtaaccaccgctttgtttaagccatttaaagccagcaacacagactcccatagacctcagcttcatctgattagcttgttccttgcggcgagcctcggccaaagcctcttgctgcttgcggagtttctccaagatctcttcctgcctcctgcgttccatctcaagcttgagtcgggcttgttcgaggagtcttttggcatcttcgtctgcttttcttttggcctcttccagctcccgcgcggccttttcctcctccgccttcaattttaatatctcctgcttctgcttctcatattcctctttcaaacgcaagtactctttctctttggcttctgctagagccttgtccttttcgagttgatgccatacttcatctgtaacatcggcatctcgctttgcagtggcagtggaattctctgtcttgggctctgtcatgtctggttccttggaggcctcattctcgatgaccgagctttgattgtccagcttggtgacaggcttactcaaaggttgagtgcgtacagccaggtctgtttgctctgccgcttggatcgcagttgatagaccgttttgcggatagacttcccggctggaccgctcattgatcattgagtcgagggcttcgagcaccgtgtcttcgctcagcaccagcttcttcccactagatgacagaagagtttcgcgaaagattgtcttcgtaagcgttccgacgtctcgtgcatttgcccagcctgcagatttcgcaagtctgtcaaagcgctgcgacattcccttcataaagtcaaaatctggaccctccaagcagactagatcgaactgagcctgtgatttgttgaggaggtctcttttttctttcaacaagagctcgtaaactaagttgacacagtctgctgaggacaatgggtcgaattgaagagactctgggaagcgactggtgagccccagattgattgacatgagacggttgatgtctccatcataaccggccagaatgatgatcagcttttgagcaaacttgggcttggtaatggcatccacaatctcatccatggcctctttggcgaaatgtccctcagcgagccgataggcttcgtcaatgaacaagacctttccaaggccacgttcgaggacttgcagagtcttcgggcctgtctggcctatatattgacccaccaagtccgtggctgaggtttcgaccacttcattcgaagctaacaagcccatgtcatagtagacttgccccatctttctagctgtgctcgtttttccggtacctaggatttaaatgtcagcaatattcggcggacaaatactgaacggagaggtgtatacctggaggaccacggaaaacaaagttaaacggcaactgcgtgcgcggatccaagtccagtcgtctaaggctctgaaccatttgccgatagccttctagtttggcaacgatactttcacatcctatgacgccttcgaacatctttgcaacactttccttcttatctgcacgatcaaagtcttcgtcaaagtcagaagcatcaagcacagaatccggaatagaaccggggtgtttgatggacgagaggcgcttttgataccgcatcttggcggcgttgagcagattatcaatcttgcctgcatttccaaaaggcggtcgattccgagcacgctcgagcatctccaataccacacagcggccacgatcatttattccaaacccttgttctttgagcttgaggtccaaaatcgcatccagctcactcgaggtgaagtcctcgaagacaaatgcctggtcaattggaaaacgtcgggtgaggccagggttgaccttttgaaacatctcttccataagatccttgtaacctagaagcaagacgcacctatcgtcaccaggtgtgctttgcacttctgccacgatggtgtctatcacggcagctcggtatgagtcactgttggaacctgtcccatccgaggtacctccagagaacagtccataggcctcgtcgatgactagaacctttcccaatgtagatgcaagtatccctttggtgttcttttcggactctccaatcacactgccaacgaagtctgacgggttctttaccaccactacgattgtcagtaaactttatagacagcggaggagcccacataccttcgccattggacaaaaacccgatatccacaagtatctgaccgtagatctttgcgatagaagttttccccgttccgggatttcccaagaaaactttgttgagactgtactcaaccaggggcttctcatccagctcacgctggtagttgtatcgcatggtgtctagtatggcctccaccgtcttcttcacagagtccaaaccaatcatagtctgcagcttttgccaagcattggatgatttcaaagcctgcgatggatctggcccgatcatgtcttccttgctcagaaagagattatcaaccttgctcgcagcctgtcgtgtttcccggctgagacgtacagcctgtcgttcagaaatcttggccatggcattctcaacggctcgtgcattggcgaatccctcacgaccacgtccgctcccaacccgacgagctacaatgcgacaataaagtccgccaaggttatcctcgaccttcatctgctttttgtatttcttttcgatgcacccgaccaaaatctgcatcaactcggcgtcgtcgaaatcatcaaacttgagctcatttgggaaacgactaggaagcccggaattgtatgcgaagaacttctccatcggtcgttgatatcccgcaagaatgaagaccacttttccggtgaggttttcaatctcagctaagaggaagtccagaacttgggggccgccgaaactgctgccgacgagctgatacgcttcatcaatgaagatggccccgccgccgtctttcaagaggttttcgatgattttttgacatcccgagacaccatcgttcgcgagtctagacccggttgtctcgatgaatttgtcgccgggaatgatccccatggacgataggaacttcgcgtatagacgcgcaacggttgttttcccgctaccgggattcccgagcaatacagatccgaatcgatcgtggctcatatcaatgttctgtctaattgcgacgtccactttagctttgatcgacaaaaactttgtcttcactgattcaagtccgatcatgtcgattaacttgtcgatctcctggctttgagcgttgaggaacttcttttgatacttccagtctgcttgagccgcggacatcttttgtgatggcatgacttgtcgacttggaggctgcacactacggctttgagtgcctgtggcactggattctgagcttgcttccgtgatggttgcgggcgtgctaggaatggccccagagctcaatttccgctgaggcgatacagggcgcggaggattcttcaaatcctcaatttcctggcggtactgttcaaggaccttcgctcgctccatatcatcgaattcatcgcgtcgcacacgcttgagatgagaagcctcctcctgagcctctgcaagcttccgggcgtactcgctctgctttctttgccgttctatctctagtctgatatcgcgtttgcgcttgcgctcttttacctgatcttcttggatgcagaaacgacatgaacccttggcctgggaacaggacagagacaaggaatgaccgcgggaacacttccatttaactatttttgtgcacttcatttttgagtggtccagaagctggtgacattttgaggggcactcgtgtactccgcaactcagtttcacgccgctatgggaaagtcagtattaagatatcagcaaaagttctggtaaacctaccaaggggcagagcatcctccgtctgggcattctctatcgaagtcctccgctgttcggagaatcgaatttgtctgcggatgctgttcgcattggacgggcagtccatcgtatagatgcccctctgacttcagttggtcgattagcggcttccagtgcttttggcccttccgactagaaacgaatgtttccgagtttccaaccataatgaggacatttcgggctcgggaaaggaggacgttgaggcgctcgggagctgccatgaatcctatgtcgccaacttgattgctgcgggtgagtgacgctatgactatctcactctcttctccttggaagttgtctattttctcaggtcagactttgcttgcacctaatttcttctccatacttaccaattgtagacagcttgattggacgcttcgaatgggaggcaccagcctgcgacagaagacctgctttgacaaggttgtgggagtcgaggtcattcagaactgggtcgttctgtttgcttagagtctgtctcagtagactaagctgacccaaatatggagtcaacacgaccagcttgtctgttccatacccctgctgtccgagatacttcacgatcttgaggacgatctctgcctcgaatacattgctcttacttccctttgagttctcgtcgtcccggtcagagacctggacaaaaatgtcttccggattttgatgatggaaaaatatcactctgtcgcacagacctcgtggctgaggacgattcttggtctttttatcgtcttccagcccaggataggtgaggttgcgcacaagacttgagatctcgggacacattctatgttgcttggccagtgtcgtatgtggaaatccgacatgtatgagtctttcgaaaagggagacgttcaggtcatagccatcgcctttctctgtgctcaagctgtagctgttgatttttggccgtagctgctgatgatctcctatcaagatcaaatgcttggtctccggtgtcattgcggtgagcacatgcgactcaaggatctcacccgcttcttcaagaagcacgatgccaggggaagcatgtcgaatgtcctcggaatacattgccgccgctgtagtggtgcagccgatgattcgctttgatttcaagatttcccggtttttctcacccagggtagcgctcagttggctttggcttttgttgaacaatgctatgctaacgcccaaagactccgcctgttcactcagcagagctttcttccaagagctgtttttctcctcccgtattttctgatcgagtgcccagatgtcgtgacaatgagcgggaagaagatcagaacatacccctgcatcctggttgcggatccatcggtgataaaggtagtcttttcgaattgcttttccactattatcgaccacggccatgctgtttggttcctccggctccggtacggtcagagctgcaaagtattctggttcttcaaactccagatagtccaagatagatgtagcattagctgtgagattcttgtaggcttggaaggagtcattcaaattgtccttttgttcatttgcgaccgcttcgagtgaatgaattgtgttccaggtggtttgatccctacggtaggacgagtgctgcttaaacaacccaagcggctcggttcgttgtgaagacttggacccgagtctgacgatagtagagggattgataccaacgtctagtaagtcttccaagaactgatccaaggcatgatttgtgtagcacataaccaggattttgtctttcgaattatcgtgcagggcctttgcgagaagagcacctatgaacgacttgccggtacctagagctcatactgtcagtttaatgtcctcggttatagaaatgagaagatcatgagaggatactaagatgatagtgggaggataatgagacgatccacatgatcttacctgggggaccttgaataagactcactctctgtgtcaacccagccaacagagaatctaactgtgaagagtccaatgtcactgacatcgaggttttcagggtgcgctggatattacatccgcgttcttcctccagcatgttgaccaaattccgaggaactaggcttgaatcctgcaccggctggcctttttcgtaaaggaacaactcctctgtgagaggcaactcaatcctctcctgcaagcccttcaaaattggctcgtatgcaaacattgctgtgtcaacaagcaggaattccacgtcattgtagagtttcaggtaaagtaatgactttttaagggcctcttcacctgtaatacgcagcataacaactggcattttgaataacagttcatcaatttctcgttcgattgtggcaaaagccacgatatctgtgtccctaaccaagcaaccaaaagcacgatgcttcacaaactgaggcgtgctgtttaagaaggctttgcgagcatcctctgagaggttcttgagcttttcaaggccatattgggcagtcacgccgatcgtacatggtcggaggtagtttggggttctagcagtgcagcggacatgagaaagattgagatttctcaagtggaaagccgagcgtcgccccttctttgtgcctgttgcaatttgcaagtcttcgcggagctccgagagcatatcttctcgcaaaaggcgaaactgattgtcaacatggccggcaatgcgttggccactggacagctgtgcgatgtcttcagcacggcgataaaagggtttctccgtacatcccatctcatcggccgtgggaaggatggccgtcaagcgaaaatcagcaaaatcattatcgtgccgaccacctgcagtgatctcagagtcttcgacggtggttgcatgtgatttcatctccagaagatatctaatcttgtggcccaagtttcgtatgtcaactgagggggaagagaaaagcgacccatccttcaaaacagtctgagcatcagctctaacgtccaccctacaagagggaggcaacgaaagcaactccgccatcaaccagcatagagtgtgggtcgcatgatcctccagtttgcgagtacggaacgcctccagaaatgcaccccagagggtgcgcggctccaagataatcagaagaagctgctcgagaaattggccgttgcagaggagcttgacttcgcggtggttcaggtattgaataaacttcgcggtgtacccgttgatgaaggtcggggttaggttaaacctcagtccatttcgcaaggcattcagagcgctttggcttgagatgattcgctgaacgacaatgctggggtcaccctggtccaaggttgcttcgataaatcgcttgaaactgttctgatcctggacttcgtgctttccctggacaacctctttgaaatatttggccagtcgctccgatcgaatattttgagacatgatagcgaatgagacttaacatagattgcaagatcaaagtggcagagacagatagaataaaaggtgtagaaagatatcagagtcgagagataagaaacagtttagattctgcattgccaacaaagcagagcacagtgagactaatgcagatgcagtctgccttgtaggcttttagctgataatgcgcagttgggctatgcgcagcaaaacccaacaaacgcaagaatgcgcaggaatagaccaatgcatgaagcacagtatgtgacgtggcgacaggggtctatgcccccgcagcataacgtgagacaacaaacaaaaagtacctaaggctttttttgtatctgtcgttgattgttcttctgcctacatacacatacttcgtcgtgctgcttcctgaccatcagagtctaccacgatgtctccacaaggaagaggaagaggacgaggacgaggacgaggacaatggagaggaagagggggagtatatgcagcccagaccagttcaccagcacctccgctaggagatatcattgtcacaatctaccacaatgaaatcgagagtccggcacctgatcaagatgaagacatatctcgaatcacgaacagtcaatatctgacatcctacaactggcttggtgggaaaaagagaaagataatcgttccaggtaagaggataatttccgataaccaaggcactgttcattaccattgcgttaactgacatattcctaggtgaaccaccaaagtggacgcctctgtccgattctcccgcgcttccacaagacaggggtgattattaccgtgatcgaaatgccgcacgataccccacctatcctctggagccaatggtacaagcaatactcacagacaaccccgagttccccattaccagtgtggacatcattgggtgcaacagtacaatggggaacctgcgacgctttgcatctgggcagggtaagccctttaggatgctagttgaggtactcggcaagacagtattcttcatcagaagggaaaattcgcccactgaggtgtttcccgatattcacggttatgggcatactttcccggaagcatacaccacgtggaatgcaagtgtgggcggatccctgtcccaccaacgggtgatgaagtatgattttgccggaatgcagtgcttggtacgttttgaaggggacggctttttgcccgacctggtcctggataccgaaaccgaaggacatcctgttaccccgaaggatagtatcgacccagaagctttgctgtccatcgagaaagtgacaatttcaggttacccctctgccattacagaaatggcaccggagcagcttgacattgcaagacaaggccggcgcattccacagtgtgcagtctttgacctgaagactcgatctcgcgctaaaaagggcagtgacattattgaggaagaactgccccggttgtggatttcgcggactcccaacttcattctagcccaccatacagctggtcgattcaagcatattcaggttcgcgacgtgcgggatgatgtgaagcagtgggaggagacccagcaaccggctttgggcaagtttgccagcttgctccaaatgatcgtggaattcgctcggagcgcggataacggaaaacttgagattgagcatgaagagggtgagcaagttttgaatctgagagaacaggggggagttgttcatggcgtcttgtccccggctgtcgcaagcaagtgggatatgtgaaccggctctctcgaggataattggtttaagctactactcttagtttgaagcttgctctgggatgtaaatcagttcaatacaatccaatctattcacttacaacaaccgactgtaaagccatcagtcttgccaggtgtgcgcaagtatggcatcaaggctggcattagaaagcagaagtgtcatatcttgactgttcatggtactgtttaacaattcaacttagacacagccctagacttgagggttcattgccatgcccggaatagcagagtgtgcaagtgtagtaatgagtgaatgaatatcgtatatttttcgctgaagggaatttctgcctcaatttcaagtgctgatatggagttgatggagcaactgtactagcaagttggaattgacatcattatttcggtcagaattcacgcccttgccgagagatgcgctgtcttgtcaaggttgttggagagccgataagccactattttgccacttcagaccgcccgacaaccctcaccaccgagctcctaacaacttgccgatcctactatctcaatttctctcttatttgcgtcaccgaggtttgacttccgagattctacctcaaactacgctattgaaaatcaggacagtttctgctagccaagatcttcgtctctgaacgagacccatcccgaaagggaattttcctttttcgcgcgacgacagcaaggtacttgctgcagaaaccggcaatatgcccaaatataagtagcctctggtctctatatttgcaactgaaagctaacttcccatgcactcttctgtaggttttgccgcaaatccacatctagacagtgtcatagcctattccgggcatgatgcgacacgaggctatgcgcctcattgcggccggctgagcccatccatcgacatattgctgactcctcacttcaacttctaggcgactactgtgatgtctacctgacacacgactcgatgagcgtacgcaaggcgcataactccggtcgaaaccacctgagaaacgtggtggactactaccaacgtacgtttgaccgatggcgcagcaaggcgcccaacccaacaactgaatgatagctaatcatgtgaacccatacagagatcggccaagaaaaggcccagtccgtcatcgactccattacctcctcctacgccgcagagggccaacaagcccccaacatgatggcccccagcgctttccctcctcccttcggattccctggtatgactatggctcttcctcccgggactccagaacaccaacccgaaaccgaaatcaagctaacgccactaggacaaccaggcatgccccctcctcccttcggtatccctccaccaggcgcccccggcgccccaggcatgctccctcgtatgtcacacccacttccacacccacccccactctggcttcccgaggaccccagccaaagatatctagcctacccaggatcataccaagctaatgactatgcctcttacccagcccacggccttcccttcccgccgcccttccctaacgccaccggaaccccgccaacaggcggcttccccccgcctctccccaacatgccccagggcgcaaacttcccgataccgccccctggtggcttcccgaacttccccatccccccgcccggcgttgctggcttcccgcctattcctggtcagcacggtatggcgccgggtggtccatcgcctattcctaccggcccccgtggcttggagggatatcctcctccccctggaggtggacctcctggtgggatggatcaacggtggtgattatgatcacgatcttggggttgattcgcacgtggattgtttctgataccttttttttcccgtgcggatcgtcggcatggcatgacatctcatgggtctttttgctctttactgttagtgtaaaatagcggtttctttttttacgtctctttactgttctgttcgtacgttctgtttcgtacaaaattgtcacttggtttctagtcgatttcgaaagacatggcgtctgaattctttacgatatacatggcactgaaacttgcaaaagaaaaacttcgacatccacatccatgtagacatcggtttcatatttacactaggattatctccagaatactggtgtataaagtgagagatgctgcccaggtgacgaccggagaaattggaatatatttcatcggcagcagacatagtgcaaagccaacaaaaagaaacgagaacccccaaggccaatcaccatacccaaatgcatcaaagaacgcccagcggaagtgaaaacaagggaaagacacggcaaaaggatttagggagagagagaaggagaaaagaagcgaggagaagaagtaaagggaaaggaagggatagatgacaaaaaaaggcgcacaaccattaagaaatggagtggattaagaaaagaagtttatctgagcgacgaggatgctgcagacggtgcgcagaagcaaaaaaagaagagaaaagaaacccgaacccagaggaatggcgaatggaaaaatcatagaccatcggtatcccgcgctaaaacaaaatcacatatcttcatctcggaagcgacaaaataagagaccaatggcattttttaatgatcatagccagcgcctcgttgccaaggactggcactgttctgggctcgatatgtcgttgacaaagcagattggccaacaggagaggtgttatcaaagctccttggcgcgggtgaaggtgaccggccgtaatggtcgtatccggggggaggattgtgatgacctgacgcgttgctggggaacagtggcacggatgggtcaacgggtgaccgaggcgcttgggcggcagacccgtgcagggagtaggtcgattccattgggcggccgacggtagcaccgtttccactggagatagaagcgctatcgtcgtcgaatgggttgttattattatattgtccaggtttcatatcaccacgcgcggtagcacccaaggcatccaattcagtggtgagctgggtttgagacttgatgaacgagccacggtcgtcgcgcatgggctggtaacgagtgtctggattcttcgacacaacggcgtatatcgaggcgagcagaaccaagatcaagaggaccaaagaaaacacggcattgtaaacgaagaagatgacacccatgacaccgatcatcattccgggggggtcgaacacatccgagaacacgagcaggaagatggagttgatgaaattgatcaccgcaatggagatgttgaaaacgttggtcttcttatccatccaaggacggagaatgcagaccgcaacaagcatgcctagctcaaggaccaccaaagccactgtttgaacgaccggtgcttcctggctcaggccgatgaacatacccttgatcaaggtatagacgaggaacggaacgacaaagtagtatgccgttgctcggtactgcacatacaaaaagccccacttgttcagacaggttgggtcggagtaaagaatatatgccgggttcttgtgcatggtaactgaacgctttgccaaacggatgaccttctgggaggcccaaccaagagagacgagcatggaaaggagcatgaccgctgccaaaacaatctcggccggcgagtcacgctgagtgaactcccagaggcaaaggatagacatctggggaaacccgatgagagtcagtcggaacaagataccacgcagtacgatcttccacccattgcggaagtcctggaaccggtcgctcttcattttgccatgcttgacaagtaactcagtaattcccttgaagagtgcaacgatgattacgacaatgcaggtgaataccgcaaagaaaatcaggccagtgaggaaaatgttggtatcctccatgtccgcacggaatccaacacgatcaattcctcggatgacaagaagtttctggcttgtctcggctctcttgactataccacttcctcgcttgacaatcattggtcccacggctctcctcatgaggttcatggccgggtcaaccaaggcacgcttacggcgcctaaggacttccacagaagtatccgaaagctgtgataggactgtcgatggggttccaccggttgatcgctgataccaggtagcaatcgtctggatgaatcccacgcggatgatacccatgctccattggaagttctgggtccaagcttccacgatcgggggcatatcaacggaggtcatgccaataatcgcttgggactgcatgaatccgaaaagagagagcgcatttgccgcaacgtgggctgcggtgttggaatgccctaggccggaggtgatagcggatgcagcgagacctaacccggatataacagcagttgtccacgagactccggattgattaacggtcttgccgttggaaagtgaggcctcgacacaagcaatcttttcttcggtgtcggctgtcctgatgacaatccgcacttttgcgtcgagatcaggcacactgaaggcgataccagggatattggctgaagtgcctgctgggaggtcgagagaaagtggacccaaatccatgggtccagcggacatgggacacatacccatgccactaattttacaaggattaagggtgctctgatatgcctggtagccatatgcggtgaaggtcatctccgcaataaccttaccctcgatgtatgagacgccatcgaagccgaccacgagggagttatttcctgggtagaagatgacgctgaaatatgttgccgtgaagttgctactttccatgcacacgctgagtgcattggattcaaggagttggacggcagaggctagcggcgccagaaaggcgacgaagcaggtgagaagagatattacccgcatgttggtgtatattcgatataaggaggaggttgtgaagcactggataggttgccagtggtataccagggcgaggggaaatctgacaggtaccgtcagtggcactccagagtaccacgttgccagccgccggatgcggaaattttggtacggcggactattgttggatagccgtggggtcgacttattcctcgatgtctctttgcagacggaggctgtgctgtatgttttggcgcaaattgtcggaaagccagggttgaatccaggtgttttgcctttcactggggcatttgaatataagcggggcgtacaagtagttgtaaaggggttgatggaatcgaaagaagctgtattggtagatcaacgagagtgtatagcctgaatgagagtacggccgagtagggcgaaaaggcgaagtggtcgagagtgagtggactggcgatacacagtatggccaaaaaaaggagtaaaggagtaataggcttgaaatggtagaaagtggtttgtggtgaagataaacggtccctagattccagaagagaagaagaaaaaaaagagagacaatgagagaacgagggtgagagggaagagtccacgggttgttcactcagggacagtcgacaagggtccgtgggaacatttgaaagacattcgaggtcgtcgcccattccactggcaaggtatgtggtatggtattgtaccaccacaggggcggctatcggacagccaatcacagtgtggtattggccggtattggtgtttgagtttgtttcgtatgtctacccactggcaccccccttcatgccactttcaaggcttcctctatgtttcacttagtgtcctccccttctgccctttattgtttcactccactaacactatttatatgcatctaatcctcgattctccggtcaaagaaaccaacctcttcactttcggtatacgcgtactaacgctactgaaagcggttgatggatcgtggcggaatcaggcgggtccttggcccttggtcttattattagcagaagacaaaagtcgggataatgccaatattaagtattacactgcgccaaaggaacggttgcccccagctgtggagtgtgccgcatacagtggaccgccacgtacggactacagactacaatggtaactttcaatatcaacttaatataatgtatgttgtactctactctcctgggcattgcgtaagtatttcgtctgccttgtccctcgctaatgatgaatcaaatttagatttcagattcccaggtccacacctctatgtcgctgcctactccatacggagacggagtactttgtgaatttcttctgtcgggtggggcctcttagctgccgcttttatgagggcgcttctggattggcctgagtaactttcagtccggagagatgacttgctcgatatcacgtgattagaagtatggggaggttggtgctgatggacaatgtgtactccgtacagatgattcaagaattttgtttactatgctaaagagtcaagcagaactagcctatgaaatccgattttgattcgattgaacgcggctcatacatcaaatacataattcatttttggccgttttcaacaacctgctccgaggtggcctctcccagcgagagcaacactgccccagcttcattgcggtgcgccgagaccgcacgcctgttctcatatatggctctccatcccgggtattgcctagctggaaaggcacactatggtcgggcggggttggcaggtccggccatataagtcggtttggtgcgttgatatatctttccatgtccccattgcgtctcgcaacccattcattcaaaaaggtgcgggatttcgatacgtcagagtcaagttcacggttgcaagtccactccgatatactctgaaccatgtccatgtgttgatcccagtggggaatgctcgtgaagtgcgtatcgtttgtgataatctcgtatagcgtgaatacgacgccagtcccatcatcgcggctatctagcaagcgttcttttccagatacggcccagttgaagtcgaagagaaggatcttatttgtatcaggatcgataagcagattccggggtgcaatatcttgatgcatgatccctagttcgggatttaggaaatccacaagtcgggtaagctgttgtagccactcaaatcggaacggtacattcagattggttggatcggcgagagttccgcctggaatatactttgttgcgaatcctatcacccgagattccacgtcttcgagaacaacacgatcaagtggtactatattaggatgcgacggcagagccttgaggatgttgatttcgtcctaggccatccggatgtttaaaggccttgtatcacgttgaatttaaaggcaaccctctgaggagtcccagattcgtcttcataggataaaagatcaacgcctggtccaagtcgatcaatttcttcgagtttagagtaatagattgtacggcaattggaaagcagcaacgagggagcgctttaatcatcaagaagggaaggtatgcaacaaataaagtgtcatcctcttttggatccattgagacttcagtaagaagcccatcatcgtcaactgtaattgagcgaacttgcggtgacagatgatcggcgaattgcgccagaatgaggcactcttggttctcctctagcagtaacactttggcgctgcctttggccttgatcatccgtagttgatcccaatcccagatgttgcaatgggcttcggttaaggggttctctttggggccgaaatagccctgattgtcagagaggaatctttcttggggcttaatcatagcaaactaaaaaagtcaaaagctctgatttattttggctagtctccacgttggctgagtgggaaaggtaaatggattgcttaaccgcacggtacgggtgacttagtgggtgcggggacgatcaggcgcgcagtcagtgatacaacaggggcgtgctcgattttactctgagcaaaaggcggcaagagataaacactaaaatggaaggagagctaagagtcattggctgatatctttgccgaattttatgtttcttagttctagatccgggggtaagcctttccgaacactaatgaaatactagcgagagctcattaactatggagtactttgtagacattattgttcttagtctactctagggttctagagccgggaagaccgttggactctatttctaccattacaattccagagcacttccaatggtaatacacatgatatagtatacgtttctattaattttgagaagacacaagagaaaatatcatcaatagactgcagatgcatggtataaggatctacatggaaacatggaaatctactaaatagcgttcacacaattgcacagcctcgtttagcatcttcatctcggctcacacgtttcagaaataaagtaacctccatatgcatggaccattcgtgagcttggtatgattgtgtcaaatcatatccccttccccttttattacaaatttgttttattattcaacatcccctgatcaccaggaaatgatgatcagaacgatcactatttccatgtgcgcgtcataacctcttcatttcccgtataatctctgacctcaacgatgtataaaatttgtggtacaaattacaataaagggacctcgagatgccaggaccattgtacgatctagtgctagttatattttcgacgcgcttaaactatgggtggtctagctagaagttgtatagctggcttgcctacctttctaggtgtgaactaaacagaaacttcccataaggtaaacactgttagcacattgatctaacctaactaggataagcttaaagtattttgtatttttggctccaccgacattatctgattcgtggttgaatcattgaatatcattggccagaaatctctgccttggctgcaattggatttcgttcaaggtatggagcactgaggttatatatcactttgtttgtaattttatacttgtcttcagtctgaagcttcaatttgtagggagcaagaatactccatcatgagtggcttggtggtgtttttgagatatttctttgcccagccttcctcgaggtttctgggtacggagtatatatccctaaatgtcttccgctagttagtggtttagctaacactactactctgtagttaacttctagactgtcaagctagctaatggctcctatcggctcttcaggaatagaaacccggcttggctggtacctacaacaggtcttaaagtcagaattcatgcataaccacagagactctgtcggagcaaggatatcgaagaccattgcccctagacaaagacaaagcagcccagcccttggaataagacaaaaactgagcaggcactaacacatttcatacaacatacatagtcacagtaatatctcagttgcctaacttgaggccaacgtagccttgcccagccttgcacagccttcagactaacatcccgtccttgttccactaaggggaacccaccaggtgcgtatactgctcggcatcatttcatctcgggtgtaaaaaatgcctgatcattttcaaaatacgggagccttaaacttgaaacacatgtgatctttgtggtcttgaagtgtcacatccaggcaaggaacaatgccacaggagatggccaacctcgtgcccaaggtaggtgccttcgtaagcaggtcaataatatcagcctcattgttcaggcaccaactgatcgagtctatcaacacgtgatgtggagttctgccatattctaccgatcagaaaaaaaaaagtagcagaatgatttccgcccgcaaagatcaataatctagacctccaaaacacaaggtccaggttatacgagacaatccctgattgatttgttcccgtgtcaaatattacactgtcgcaggaccaatcaacaaaatgcctggccccgtggacaccgcgaagtccatcaacaagcgcaagagaaagcacggctcgaaagcagagagcgatgccgccaagcccgtggaagccaaatccagcccttcagtgaccccgaaaaagagtgttgcttcgaccccgaaggcttcggctgagaaaactaccaagaagcgcaaggtcagcccttcaccaagtgccgaggaagagagcgccgatgaagagagcgacgacgccgaggccgctgaagatgtcgaggtagatgcggaggaggagagtgatgctgaagactcggaggctgcgaatggtacagatcttccgactttggaagatgtccgcttgccccagaccgagggcaagctgcagaagttcactgagctcaacctttccgagaaaaccatgcagggtatcaacgacatgggcttcacaaccatgactgaaattcaacagcgtaccattcctcctttgcttgccggacgcgatgtgctcggtgctgcaaagactggttctggaaagactttggccttcctgctccccgcgattgagatgctgcacgccctgcgcttcaagcccagaaacggtgagttttccccacacatttatctgatatttactttccattgagactggtggctaacctttgatgcaggtactggtgttctcgtcgtgtcccctacccgcgaattggcactgcagatcttcggtgtcgcccgtgaactcatggcccaccactcgcagacatacggtattgttattggaggtgccaaccgtcgcgctgaggccgagaagctgatgaagggtgtcaacttgcttattgcgacacccggtcgtttgctggatcacctccagaacacccaaggattcatcttcaagaacctgaagaccttggtcattgacgaggctgaccgaattctcgaagtcggcttcgaagatgagatgcgccaggttgttaggattctgcctaaagaagaacgtcagactatgcttttctccgccacacagaccaccaaggtcgaggatctggcccggatatctctacgccccggaccgctttacattaacgtcgaccacagcaaggagcacagcacggtggcgggtttggaacaaggctacgtagtgtgtgaggcagacaagcgtttcttgcttctcttctcattcctcaagcgtaacctcaagaagaagattattgtcttcttctcgagctgcaattgcgtcaagtaccatgccgagcttttgaactacatcgatctccccgttctggagctgcacggaaagcagaagcagcagaagcggaccaatactttcttcgagttctgcaatgccaagcaaggtaccttgatttgtactgatgttgctgctcgtggcctggatgtacgttccctaaccccattaccacgttgattccataattgactcaaattccagatccctgctgtcgattggattatccagtttgaccctcctgatgatccccgtgactacattcatcgtgtcggacgtaccgcccgtggtgccgaaggcaagggtcgcagtctgatgttcctccagccttccgaggttggtttcttgaagcacctcaaggacgcgcgtgtgcctgtcgtggagttcgagttcccggcctccaagattgtcaatgtgcagtctcagctagagaagctcatcggccagaactactacctcaacaaggtaagctatcttcccttattacttatgtgttaccttatactaacccacttgtgcagtctgccaaggatggttaccgttcttatctccaagcatacgcctcgcactctcttcgtaccgtgttcgacgtgaacaagcttgacctcgtcaaggttgccaagggcttcggattcaatgccccacctcgcattgacatccagctgggcgccagtctcagccgcgataagaagcaggagcagcaaggacgccgcacgtacggcagtcagcctaagcacggtgctggactgaagttcaagcggaagcacaatgactgagaacaatctgtatgaacatcaaaagcgatcgattgtctctgcatatttattttagggacattggagttcagcaatgtggatatatctatttgggtttcaattttgtccccttattctgtaatcatgagagatggcatccgagttaaatattcggtgggatagtcgaatgtatcttgcttatatggataactctcttctttgcacctccttgcgccttgtaccatggtttgtccataccgttacacggtaagcatatgctcagcctagaggtctgcccgatatatgtttggtcatctacatcgccgcaaatcgtacaacatctaactatataatgatcgtaaagcttattccttgtcacggaatgccacagccagcattcattgagccatgtgggattcaaccttttcccacgtggaaaggatttgacttcaaacaagaagaggagagctacagaaaaggtatgtgcaatgcaaatctctatactaaaggatccttactgaagtactccgtacatattggtacctacatgtagtgagttactcaaccccccatacccaccgaagcgatccaattggaagatgccaattctattgtggacaagcgatcgttgccaatgacaaagtcaagcagctcgattgccactaatgtacgagatgcagcaagtgctcaacctccagctgcgccagtagtctggatgtgaattgcttggacccccttgcaagcgctactatagttctgtccagtcagaggtgagatcacggatagttagttatgttgtaatgcatctggggccaaaagttgggaaatattgccggtgtattattgtgtatctgtgcgattgataggccaatcatttcattgattccaccaattccaattatcccaacatggagaagtcggcaaggtggaagcccgagcacacgagtgtgatgagttggcagacgctgagcccaatcacccgatcttgtccagggtctctgtcgtctgggcgacggtgtgtgcctatttcggtgttttttcgccttgtcttttgcgggtccacggagaactgcaggtggaccgtgtgtgatcgtgtgtgacgaggacaccaaagcgtttcgccgggtttgtgatggggtgtttgggagggaaagttgggttggggttggtctagagggctggagatgcccaattcgcccagccacgacgtcctcagatgttgagtatacagagcagggcctggaggtgaataaaataaataaagtaattgaagaaccaaggaaccaaagacgatcccgaacggattccagggttccgtttgtttacaacgtccctatcttcgtcggtcacgggtacacaggtagcggtcgggtactctttgtatggtggcccacgcggctcggaacctgcgatgtacaatcgccaacacatccagcctcttcatttttcgtttttttttttctatgaggctgggcatcttaattactcgggtaccggctgatattcgcctgacttatcctttgcttcatctttcattcctagcgattctgaattcctttccccttttcctctctcgcattttcatgtgagggatcggcgagcttcgacagcaacacttcttgggcaccctcaccgttgcttcctctctctccttcctaattctccccattcttaattcttccccactgttccgtggtctgcgctggtacgctctcaactcctatcaaaataattctcgggttctcttcttgggttcctgtaatttgtccttccccactatcgtgccaacaagcacggagcaacagtgatcaccctgacaacactcccctccatcaccctcggtcgagcacgacggagcatgcgattgggttgaaggacgcctcaccaccatgggggtcaacacccgcaaaccgatccttcccgcccccacagaatccatcatcgataccacgggggacagcgcaacaggcacagatctggcaactgacctttctcgccgcacagacaaaacgtcgtactccatcccagacgacggtagccccgtcactgtctccactcggcggcagcgggaacgcgaggaaaaattgtctcgagctcaacaggactctcacacctcattactcatcgagtatttcgagggcggcaaaggttcaagcggcattgtctctcgtcctagtgtgcgagtgcgtgtgaccccatcgtcagctagaaagtccagagataagaaagaccactttcaaatcaccgaatcaagccgaagccacagccgcaaaccgtcatatacccaccggatatccctaccatcagcatccgcaaagcagaagcaattggaatcggaagcggatgaccagagctttagttcgaattcagccgaggaagaggctcattattcgtcacgtcgcgatccggtagatatcgaaattgtgaaccgcggacagggtagcgagatgtcttccatctcgcaagataatcgatacatgaccaacgcctcagaggtttcgtccatgccaccggacagcatgatcaacgcgtcgtcggctggtcccaggcggaaacgcagccagagtatggagcgtgatgccgacgaagataagggattgctcaagacccctcaccgacaaagaagtcgcagtttaagtcatgagcgaattgcgcatcgcgtggcagaaaagctcaccgagtcaccgcaagaggcttcgagcggcagacacagaagcaagggcggcaaggattacctcgaagccgaaacaaaaccatcccgtcgccgaacgcgcaagtatgcggaagaggatgtcaccagtcctgactctagtattctcagcacatcgggagtctcttcaaaccgcaagtccgatcagtactcagttcgctccggtgcatctaaatcctctatcaacaatccaaagttactcgagacggttgaagatgcgatcagaagattaattctaccggaactaaaggaactcaagaaggaccaaaaagtaatgaccaacaagaacaaattcgatcgggacgtggctacatctcattcgtctggcacgagctccagagatgagctaggtcgacgtctctccaagcacgccagtgcgccggatgttatgccccaagttgttctgaacaagaatagcaaagacgaaggcattgttctttctcccgaggcggccccacgcagtaaagaggtcaaggaagtgaaggaggtcaaggagcgtaaaccaagcaaaagcagcgaaagctccgaactggcgatgagatgggccaatcgacccgacttcaccgaacaagacaagatccgcaggcagaagagcaagggtctccgcgacgcccatgctgctgcccgagttgggtctgctcttacggcagcttctttgaaacaccacgattcgaactctagtctcggcagaaatgatcgccgccgagagagtggctctcggaaaagttcacgcaagagtaccgagagtatgaactataacgaaaccgagcttgttttccagaagcacaatgttgcgccaatgccaatgcgcagcgagatggactccgagttgaccagaaactcgctgctctcggagcgaacggcaagtcccactcccgaaaaacaaacctcttatttcgacactactcgcggatcgccgaggcaggccatgtcgccagcttctcgcactcctactagaaactctgccgactcgcgttatgggctcggaatgcgccatggcaatcagtcgcaacataatatttcggtgcacagtgcttcggagcgtgaccttcatcaccagagccaatcccctggaaccgatggtggtaaccgggcaattgcagctgcagccgcagctaatctccttgatgctgctcaccccggacatcatgaaacggaagatgactatcacaatgggaccaacagccgcggactgagccccattcagagtcttgcaagtgatcatactggaattcgccacgatcattactcgactcacagtgatcagcatgtcgacggcaaacatgagatggagcctcgactctccatagactctccgtcatccgcccccagtacaaacctcgcgagatccactcgtcagggcactagctcacacagccagagtgcaatctttaagcagcacagccaggaatcacctgggctcggatacgaacattcgcgccagggctcccaagacgatggcttctatggctatgacgaggagagcagacgctctcacgacgatggggatagcgatgttgacttcatggagaaagtcaaagaaggccaccgtgtgactaccggtgctgctgccaatccccaatttatgcacccgatgcccgtcgaatctgcagtcgcttccttgatggatccatctgtccttgattctcatgtctcatcgaaccgctcgcaaacagatctaagtcaacgaccaggcaaccgaagccctgaaaagccaggaagcgaagtttatcgcggaagtcctttgaagcaacgccaggatgctttcactgccgatgagacctcgttcccccgacgcatgggtgccacatcgccccctcagagcgttacccagtctttggacgatattgacgactctgctatgatggatgccaatgtcccacatggaaagcaaagtcctcacacggatgctgaaagccaagtctcagagtctgaaatcaacaccaacccgtccattatacagggccccattggtggtgtcgctcaggcagaaaactggggatatgattcaagatctccgccaccggatcactactacgatacccagatcggcggatctaagggtctcaatgccgagcagcagataggacttgatgcggaatactaccagactgcccagaatatctttggcggtgatgactactctgcccactctggcgacaaccaggcccggcaatcgtttggtacccctcctggtgccaaggacgaaggctacgtttcggctgccaaccccatgtctcccagcatcgggaccccgaagcaagctagtcgaggtcttgccggcgcggatgccgctggaatgggtagtttcgatagttctgccggggcagacgatccttttgcctctggtaatgagcgccacttcagtggctactctcacggtgttggctccccactctacgacagtgctaccggccgaggcattgagagaattcagtcccaggacattgtggctcttatggatcatttgactgttcgagacgcccagcggaatgccagagataccgagattctgattactttggtccgaagtgctgctgagatgcgcacttcctttgagcagatgaggagattcatcgccgaccaagatgatctcatcatggacgtgagtgacaggggacatgagcggactcacagggcgcttggtggtccgcgaccattaccccccagtggttctcggactcggcagctgaacgctgaagaggaagataagcggaagaacatcttcaagcgtgcgctcaagggattgagtctcaagtcgggcagtgatttgaccaagattgagggcatgctcgagcacctgcttgacgaggttgaggccctgcgttccggacaagatggcctaagccctcacggtggtaccagaatgggaagcatagagccaaatgggtacgagactcctggtccgaatggtgtacctactgagacgagccgctcgccctacgggtccggctcttctcgtccagccaatgcgcagcgcagaaattcggaccagcgagtcagcaccgtccatgaagttgacgaagaccttgagcttgacgagggtgaccagtttctgacttcacatctccctgtccgcgatgcgccccatcatgagcggtcgggttcattgccgcttgacacgcccccacgcaagccagtaaccacgtcagctcgtagcaccgagacaacccccaaggctcgcaagcacaagtccagcagctcgtccattttcccgaagatctcgcgctggtctaagtccacggcgacctccatgggcgacggtattcgcaacagcatccagccttcccgcaaagagcgtccgacctcggatgagtctcggtctggatctgatctcgcaccccagggagcgtatcatgatccccaaggggatgacagaatccgatccaattataccttgaacgaagagcaagatgagaacagacctccttcaccgctagtgccttcccaggtgtctgaggcgcccaaataccgcggccaccgtggaagtctcgagctgcagcacccccagcctcggcaaggcccaaccgcccgttaccagtcccgcctcgaaaccgaggcccaggtctacggaggcccggtttctcccactggctcagaacagtgggattccaaccccagcctggtcaacccttcccagaaccgcaacagcggtgccgcgcgcctgtccccgatctccgacgcaggctactcggagaccagctcccaagcaacccgtacaccaggtccaccccgtcctcctaaaatcctcgattcgggtcctctcattcccgagcgtcaacccaaagcgacggataacgaggaaccagcttacagcggtgaccgtgttgtttctagagtatgtattcccaaggatccccgctaccgtttcagttgaacaagttctaatctccactcttcagagctctgccgtctgctcgccccccactcgcaagccaactggcccgcgtccccttgcatctgccggctcctacagcccaggcaatatcaagcgaacccgctaccgaggcagtcccgtgcaaatcgactatgacgatgagtagtattgagacttgcattgtgatacccctgggttgatgttttcaatctccatttccatctagcgcttttgccttttcttcttgctctttccttacgacagttatgaccgttccctgggactccggtttcagttccgttaaccctaaatctatgagcaatgtgtgtgcatgtttaaatgtctacaatatttcctgcctttatgttttatgtcaatggccatgagatgagcgggaagttatgtcttctcttcgcctctctgactttttccactctaagtttctctgcttatttttcatgctcttgcttccggcatgcagctactctcgcgcgtctactaagcgtgaagcctattctttgtagcttttgtgttgtggtgtagatagtggtgcagaagaagacagaatatattacaagttcgaggtgtggaattatctttcggttcttttgtacctttctgttgatgccaagggatatgaatgccaaaggttggttctgtatatgctcgctagtgtagtttcgagcgattctcttctaataatcaattcgtaatttgcatctcttcttcgtcttggaggatgtctctggcgtatctccttacgcattatgcataagccaaattgaggtctggtcacgggccgtgccggtgtgtagatcaaggggccaccttccgtcactcatctatcgttatctcgacattcccatccatatttcgacataaatccaacgctctataagaaaaactggcgttatctcagagatgctctcgtcttttcttaagtccttgccccggctcggaagaagatggacacctctcaacttcaccaatcagaatttcactcggataccaacgagccatgcaatcgaggaggaaactatcccaggctatgttgctggtcggtattatcctactcgaatgggggaaatactcaaggaccgataccaagttgtggggaagctggggtttggagtcagctcaaccgtgtggctcgcacgtgatatagagtaagacgacgatacctttacaactccttcactcactgaaaatatagctatcgtcgctatgtcactcttaagattttcataaagtccacaacgatgggccagcaattggatgacgagctgaagatatacaaacgtatcgaaagcgctccccggaatcacgcaggtcgcaagtatgttagatctctgctggactcctttgatatcagtggacctgaagacaaacatcgatgtctcgtgcatcccccgttgtgggagagtatgttggatttcctgttccgcaacccggtgcagagactaccaacaccgatcttggcagtgacgcttcatcgtctatttcttgcattagactatttgcatacagaatgcaagatcatccatactggtgcaattttctttccccagtcttgagatcgatcatttgcttatcaatatatcagatatcaaagcagataacattatgttcggcattgctgatgattccgttttcagagattttgaaaacgatgagcttcaagatccttgtcctaggaaggagttagatggaaggacaatctatacctccagcgtgcttagaacgcctaaagacgtaggcgcgcctgtcctctgcgatttcggctcggctgtgatgggcgacgaacagcacaccgaagacattcagccggatatatatcgagcaccggaagtgatcttgcaagttccatggtcatatagtgtcgatgtatggaacgtgggatgtgtggtaagaaagcctatacttctgatgcaaaaaaagtgaagttttaggcttacgttgtcagatttggaaccttttcgaagggggatcgctgtttagcggccaggacccagagttcaagacttataggagtcgagctcatcttgccgaaatgatacgcctgctcggtccgccaccgccaaacttccttgcccgggggaatcacacgaaaaagttcttttcagaggaaggtaattcatctatctgtcattttcctacctatgactagaaagtgtcaattattgactgtttctgctattctaggtgactttctcattggaaaattagtaggagaacacgtaccaatcgagcaaagggagactagtctcgagggagaggaaaaagagatgtttcttcgcctagtgcggaaaatgctacaatgggagcccgaaaagcgaagctctgccgcggaactcgaacaggacgagtgagtgcaaacagaattacgtaaataactgcatgtccttcagagtgtactataagaaccacacagagtgcgaagcgcatgcgaatacaccgatatccccactcctgctcatacatggagaagtctcccctttaagccgtgacgcgtctaggcagtcttttagggcattagcggacctgcagcggcgatccatctgcattattacgacaattccgacatccgattccgaacaacgatttcccttgaataaaaatagagaatgagcggtttgagttccaaggattttgttcggcgtctcggtatctcggggctcggagtgggtccgccatccgaagtatgcagtatcccgagaaatctcatggatcggcttgtgtcactcaaatttgatgtgtggcgatccgaagctgccgccgtgaagactcctaaaggaatatttaagctggataaattgccaagggctgccctggttcaactgcacttatcacatacacaatctccatccacgaagacatattcacaatggccagcattgaacctcacctctgcttccggtcatttgtcgaagccttgaaggccgacaatgatctggttgagatcgacactccaatcgaccccaacctcgaagcagccgctatcactcgtcttgtctgtgaaacgaacgacaaggccccgctcttcaacaacataattggtactgagaagggtcttttccgcatcctaggtgcccctgcatctctgagaaattcctcaaaggatcgctatggtcgacttgcacgacacttggccttgccaccgaccgcatctatgcgcgacatcctcgacaagatgctctcggctggcaccccgatcccacccaacatcgtgtctaccggtccttgcaaagagaacttcctcgaagaaagccagattgatctgaccaagctgcctgcgcctctgattcaccaggctgatggaggaaagtacatccagacgtacggaatgcacattgttcagtcccccgatggatcctggactaactggtctattgcccgtgctatggtctccgacgataagcacctgaccggtttagtcattgagcctcagcacctctggcagatccaccagatgtggaagaaggaaggccgcgacgccccttgggctctggcatttggtgttccccctgccgccatcatggcctcgagcatgcccatcccggatggtgtgtccgaggcgggatatgtcggctccatgactggatccgccttggatctggtaaagtgcgatactaacgatctctacgtgcctgccacctctgagattgtcttcgagggtaccctttctatcacggacaagggtcccgagggtccttttggtgagatgcacggctatgtcttccctggagatgtccacctgtgtcccaagtacaaggtcaaccgcattacctaccgcaacgatcccattatgcccatgtcatcttgcggtcgactgaccgatgagactgtaagccatccatctccatatttccggatccctactaatagtattagcataccatgatcggatcactggccgctgccgtgatccgcaagatctgccaacaagccggtctccccgtaaacgacgccttcgcgccgttcgagtcccaagtgacctgggtcgccctgagaatcgacaccgcaaagctgcgggaaatgaagacgaccccgaaagaattctccaagaaggtcggcgacctgatctttaactccaaggccggatacactatccaccggctggtgctttgtggcgatgacattgatgtctataatggcaaggacgtgatgtgggctttctcgactcgctgccgtcctaacctcgatgagatcttcttcgaggatgtgcccgggttccctcttattccatacatgtcccatggaaacggatcgccagtgaagggtggaaaggttgtttctgatgctcttctcccctgtgagtatactaccgggaaaaattgggaggccgccgattttgagagctcgtatcctgaggcggtcaagcagaaggttttggccaactggacgaagatgggattccgggaggagtaaatcaaatgtatatagtactttgttacctcaaatgtagattggaattttgataaatacagtatataaacttttttggtaattcgggtatatccccggggccatggatacttgccaagcaaccatggccggccccgtaccggtgtaagcccccgtgtaacccgaagtgggcagttctgtcaaggcggaaacccaacccgacctgcgtttcgccctacatggctcagtttagcccatatcaccctataccaagctcggatgcgtgttattgtattgaaagagtcacaacctttcaaacgacacaccttcttggccaatacaacaacccctgataatcccggtacctcggagtcctcggcagcatgagcgccgtcagtcaaagcgaagcagaccgggtgctacacctcaagagccgagagcgagaggctcatgcatgctacacatgcagaaagcggaaagtcaaatgcgatggaaaccaaccatgtcgtacttgtcagaagcgaaaacaccccgaaatctgcacctacgcccttgcacattcgaggcgcagatcggcttctcgccacagtgtcgctcgctcggcttcgcccagatcaccggccgtagcaagcaacgaacaagcacggcctgatgatagttcgaaaaattatgtctattctggtgacaattcggttgtttcgatcctgcgcatgcgagcatcggacgtcaatggatcggtggcccgcgatgttggatctgttcttggtctgcagaataccttcagcaattatatttttatggattcgaagacgccgcttgagaggtggaagtcactgctgactgtaatgcctcagagatcagaggtcttgaagtaagttgcaaacaactaaaaaggaatacggctgactggttagattctttcacttttatcgtgtcacagcatatccattcaatccaatactcgctgacatagaccgctttgaatctgatttatgcacctatctcaatgctcacgcatctggtgaagtacgcgacccggaaaagatcactgatcgctgggcaaccgacaagtctattggccatatcagccttctactagcaacattggcggcaggggcgcattactccgatactgaataccccgaacgctttgaactgtcaactgactttggtaagcttcatcgcacgctcatcaagcttggctaacggtatccagcccgtcgatcatttcatgctctccgcttggccaatttccttttccgaccatcactagatattatacaagcgctgcttatcttggggaatacgctgcagaatatgggacagtccgacgccgcctgggcgttactgggaacgacgatccgattagctcagactatgggcctacacactgaaaggagtactgttcactggccggaaaatgtgagaacgaaggccacgaatctttggtatggaaatcagactatatgcatacctactcgacaactaacttcccacaggtcaacaattgtctggcaggatagtttactgtgcctttgctatgaccgaccgcctattgtctccgtgactggctggtctcccgttaactcgtttttcgagagacaagacttgtccttcgcagaagtgatgtactttatctgtcgtattggtctagatactatgcgaccggaaagcctcagcgtcgctgaatatgaactagcaatagaagggttgcgtcagctagattatgctcatcaacgcggtctaccacatcttcgatcacgggaaaattgcacaacactacaacaacatctcgagcatttagctcttagaatgcacacctccttttgtgtatcggttctctgccgaccggccatgaagcagtccaccccacagccttttctccaccacgctgatattcttcgggcgcgtgccaaaggaagcttgatcgatgcttccagggcatttcttgattttcaagctctaagtactgttccattgcggacctggtcaatggtgcatacagtgttgagttcgaccctgcttctctgcatctgggaagagacgcgcaatgaccccgaatgtcgcaatcttcaacagaaagtcatcgacgtcttctcatcgtctaattcaggaactaatgacgatggtgcttcttcatctgaaagtgatagtcagtggttatcggctcgtcacatccgagccttggtgactttacgaagcgccttggatcgagagcaggaaacgggcgctaccgaaacagagaactgggcagaaatgacctcgaatatggtgccgcaatttggtcctgggtaagtttcctgtccgtagtgaagatggatgctcacatctgaacaggcccatggacatgcccaacccattcgatgtatcacctgtcacatatttggactcgatcatgaaccgtaagcacggtttgcctggtttctattaacaaaagctgacatctcacagttccggtgtttgattatacacaggaaaatggatttctgtgagaaccttaaagccgataccctgcgtgcggtcatgagggccagacctagatcaattacgttttcacaaagcataggcacatacagtaattacccatccaggctttcttgcagatcttcccatcgatctttccctaaataagtggcgccactgtgtaatggccctccgcaaaatcatcggctctcggcctcggggcctcggacgactcaattcggagtctctaaaatctcaatgacatattctcctgtttttcgggccatgcgataacttctagtaagaaaccccgcgcaacatgaatattcggcatcttgccgtagattaatataaaacaagccagggttgctaggctcagttcattcatcacacctatcttcacagctccacgcatcactcaacaagaccgaaataacaccttcaacaaacctcaaaccaatgctttctcttctctctggaacccaaaccccatcttccagtcgccattcccccggagacagtccaactgaaacagccatgccagccatcgatcaagcccctcaacaaacccgacgcagacgcatcgtggtcgcaatgaccggcgcaacgggcgcaattctcggaatcaaagcgctcattgccctgcgtcgtctaaacgtggaaacccacctggtcatgagcaaatgggccgaagcgaccatcaaatacgaaaccgactaccacccctcgaacgtcaaagcactagcagatcacgtccacaatatcaatgacatggcagcgccgatctctagcggatccttcaaaaccgatggcatgatcgttgctccatgtagtatgaagacactggctgctattcacagtggtttctgtgatgatttgatctcgcgcactgcggatgtcatgttgaaagagagacggaaacttgtcctcgttgcgagggaaacaccgcttagcgatattcacctgcgtaatatgctggaggtttcccgtgctggtgcgatcatcttcccgccggtgccggcgtactatatccggcctgcgtcggtggacgacttggttgatcagagtgtggggcgcatgctggatctgtttgatttggagacaggggactttgagagatgggaaggatggcagactcagaaatgaaggccagagctgggttggttcgttttgtcttgcatttattggcgttgatatagactggtgtactcgaaaatttacagtgcttttcatcgacgtcagctttctattcccctcattagatcgatatcgagttcagggtaagtcctgaaactggtgaatacagccgatatcctgaattacttcctggtatgtcccatagtagtcacgcggaaagttactaatttccaaaacccggcattactctacccgccctgtatccggtggttccttccagatcaacgaggataataattgggaaggcgaagaataccaaaaaggaaggagctactccgtagacacccccaaagtcggctctttcctcgggaactcggagacttcggaggccttggaaccttagaaccttataattgttcccgcggctccacttgcctaacccttcttcaacctcctttctctctattgatgtctagtatcaggcacactgctcgttccatcatgtctgctattgcctgcaaacatcttcgtccgcgaaagttcgcacctctcggtgtggagacgtcatctatccctctcctgaagggaattgtgtttgatgtggatgggaccttgtggtgagtcattctttattctttctcttcctaatactctatatatgtgctgtagttatttcccttgttgtatgtttgctatttgcgtgcaccctcgagagctggtatctacatcttgagctattatttggaagtggccggcctgggggcaagaaatgaggattgaggcatcaatttgagattcaggcagaaacgatttcctattcaggaaaatatacctgcttgcgcaggttagatgataagccggtctgggacgtagtagttgagtggaggcgttccctttctcttcgggctttatatcgtattccatctttttcgtcttgttgttttctatttggtattggggcgattctcatgataccaagctctgatcgtgttatcaacaacagtatattgaccgaacctcgctaaccttgaccagcttaccacaaaactatatgttccgtcagatgaggtatgctctactgcctgcgagccattcaaacccctctgtaacaaatattccactatagagaagcactaggaatcgacagctccgtcgatatcctccaccacatccgccaactccccaccgaagaacaacccacagccgtatcgaaggtgcaagcagtagagcgccgagccatggccgaccagcagccgcagcccggcctggttctcctaatggactaccttgaatcccgcggcgtacgacgagcgctctgcacacggaacttcgagtacgttgtagttatcaacgcaaccttccacatgcattctagatacgtactgtaatgtgcacacaacgctaacctatattcgcatctttagagcaccagtccagaacctgattgacaatcatctcaacggtcatgtcttcctaccaatcatcacgcgggacacgccaaatctcctgcccaagcctgatcccgccggcattctgcatattgcgagtgaatggggtcttgatgatggtcggaatttgatcatggttggtgatagcattgatgatatgacggctgggcatatggctggcgctgcgacggtgttgcttttgaatgagcataatgtgcatttgaaggaacatccgcatacggatctttgcattaagcagctatctgatttgatcgatgttctggaggcaggatttgtcgggactagagagaacgatgagcatggcgcgtgatgggatctaggtggaggctgccggatggatattgggcagcatgggtatgtagtgcgtacaatataagaaatatacttgctcaagcgagagattttgaataaactgtcatttaatcgtacatacttgctcagctgagactgagcggaatggtagatgctgttgctggctttcgccgagatctgtcgctcaattctgaaggggtaaaacctccttcttaccacccgcggcttcggccgccgccaccaccaccattacgtggtccgcgtgagaatcctcctcgttgtgatccgcggtttcggccgccgcctctcggtggaggaggaccccgtggaagaggcgggttgggggagcgcgcgcgattgttgtttccagagaatgttgagcgaccacgagaaggccctctagatggtggatcaccaccgcgtttagctctgcttgggaccctgatggaaagagtattgccacgaggagcagggatggggcgtcctcggccgccgcgggatatgcgggacatcatgtcatcatcgtctggggatgggggtcgcgaccattctctgtctcgtccgcgagatcggcttggtgggccggtctctcgctgcgggaggacggtgttgaggtttgtgatcatatctgggtcgattcccttcaaggtaaatgatgatgacgcggctgttgcgcgtaagctgctagatgggcaatctcctacaagatgcttcgcactgcagcaattcgcacagcagattgacactatgacttggtcggagtgaagatccctccttgggaacttccataggaaatcacattcggcttccaggtgttcattgccgcagtagtcacatggcacttcgtaagcgaagttccgtagctttgcatcgcattgcggttcgtcgtgaccacgttcacggcatctttggcatcgtcgccaatcgggacaagtactgctttggtgctgattccaggcaccgcagtgttcacacttcatatttgaggttagtaatgtgaaaataaataactagatgcaagacagaacatacctcttttgctgggcagacatcggctatatggccctcattttgacattcgagacaagagatgggaagtttgaggtctagatcatggatgttacgatcaaaatagacgtacttcgcaaggatctcaaggtctgtctggcttagatccactaaagcaacaggcgcatttggatatttgattgagaaaagtcggaacgcttcctctttcgacccaggtccggattgtgtagatgtgcctgagtttccggtgttggacccatgctgatgggctagagtggcagggtcatagtcattgataccatccatcttgtcccctatgttcagcaggatagagtcatcagcttcagaaccaagagaatctgaatcatccgtgtcactcttggagtcaatttccccatcttccagctcaccgtcgtcttgaggttggttgtttgctgtgggcttgtcttcgccattggccgaaagagattcactgcgactgcgccaatatttatcattcacggcttcaaactgagtgggcttctcatcgggtggtgctggtcgttttccaagtgttgtgtgtactagagcggggttctcgtcggctggtgctgatcgttttccaagtgttgtgcgcactggagccttccgaccttggttccagctaattgcaggcgcggtgctaccggcatgtgggtttgcgacggtagttggggccgcattagaatcggaggctgaactagatccagagctagatgtgttgtctggatcatccactggcagtgaggtggcactgaatgcaacaccttttggaacaaagtcagctaggtccgagtccttatttctattgcggcgccgtctcttggtcgggcgggtgctgtcgcgggatgcggagcgcgaggaacgcggattggaccgagtgcgcggtgcgcccaccagggctgtgcgtgaatcagcctcttcatctgatggatttgccatttggttaatttaattggataatctggataaaaatatcgggagatagagtgagatagagtgagagagagtctggaaggatcaacagtagaatttgggtcccagagaatttcacggcagacgatatagaccactcgcgcaattccacaattggagtttacgacttcgggagatatatgaggcgataagttgtagaacccttggtttgcactccgataaggtttataaccttctttctgtagtatataggaaggaaactattggttgcttttgttttttgagaacagtatctcccaataaatcattacagagagcactagcagacctcgtctcggttgtatacaaccgagacacaaaagaaatcagataatacaagatagataactctaagatcaagtcaacaggtcaattgatcaatgtcaatatgatctagacatgatctagacggcaggcaggccactagccagtaaacccttttgaccggggttgcactcgtgacttcaacatcatatttagattcattcgggtattaatgatacagattatgagccaacacgccacctccaagggcgagtcattaaagctgcagtctgcgtaggatctacccgtaggaggcgatcgacgccaagagtggggttgatgtcatattcgtagtcccaaccgaatgttattatggatcttatggatcttatggatatccatcttaacccctcgttatggtttatggattgggctgatactgttgagtatctatgaactacagctaggtgaatgttcatagcccgcactcatccgcactcccatttgccagattaacgagttgattctaaactgacctggcagtgttggagaactacctagccagcaccagctcttactggataaaccaaagacccatctactcttatttgccggtgacataaaacgctacatataagcacggcaataccaaataatttgggcggaatccgagccagtgttcccgcgatcaactacctcggtttataacaaccgagtatcgggctcgtcatgtaggatgaaggcctctttccatgtcgataagatttgtggagctctacgacagcaccttcagaaacaagaacccggtacatgatttttgtattcaacaatgcagacctctcccatttcatagccattgagaagatgaccacctgccgtggcctagtggactaaatactatgtatcaacaatctttatcaactgttcatgacacctgttcagcattttgcccccggggataacacctcaatacgaagggaaagccggtggcttagcctgaagaagaccgtgccctaaacacggcagaatattgcatgctgccttttcactagaggtctcgaactcattgctattatgcaaacacataaggcccttggctttgaatgtatgattgcacaagaatagcttatgcatctgctaagaatctactatttggccaggtaacattagagattttatataagaacataccgacatattctatatgtatttctaggtctttcaatgtcttctgagatggcaaacgtggcaataagcataattaatttggcatagttgagtaaaggtggccaagtccatatttttagtcttttctatatgcatctatcgaagtctcaagccatattgccccataaaaggaaacgtcaacgataagaaacgtttcagatcttcataaaaccagaccaaaaagacaggatatatataggaaccttcccctttcctgaatccttgatataaagtacaatatagttttactcctttcgggctagattccgcacatgcatacgttttgtacatgggccaattatgcattttgcctctagttgctaggccaatcctgaaagtaggaaatagattagggagaaaaaagacccaatctaattatagacctctgatagaaaagcgagaaggaaaaaaaagatagtcccagcaagaaaaacgagaaaatacgtgaatcagagagctcttccgcaccccgtgaccgaaagccgatccgaccggcaaactcccagtctgggccgtgccacctcatccccacgctccttttcattcttctctccttctcttccaacttattcttttccttttggatccaaccgtcaagctggcgtccgacaattcaaaagtgtcttccctgttgaccccccgggggatatcctttcctccggatgttgacacagggccgcagcggttgtctccaaggatgacctcaaaacaaggccgccggaggcggtccagcagtcttatctaccaggaaccggccgaatctattgagcacactagtgatcaagccgcattgccaaacctgaatgcgaactgggtgaattccaagggtgagtgaccaaaaaaagccgatcctggagaccacatatcacaagatagagaagaaaacaaggactaacgtggaatcttatttcaattacaggtgcttggaccattcatttcgtgtgtatcgccgctctcaagatcttctacgacatcatccccggcgtctcgcaggaaacttcatggaccctcaccaatatcagctacatgttcggatctttcctcatgttccactgggtgcggggcatcccatttgaattcaacgccggtgcctatgacaatctcaacatgtgggagcagatcgacaacggcgatcagtatacgcccgctaagaagttcttgctctgcgtgcctatcgtgctcttcctcctcagcactcattacacccatttcgatttgacccacttcactatcaacttcctggccacattgggggtggtcattcctaagctgcctttcgtatgttatatctgctcgggagaagacttacgaatctcatttgctaacattctgattagtcgcatcggctgcgaataggtctcttctccgatatacccgaggagtcatagtggctcccatttaatctttccttttttttctcaccgataactacccatgttggcgtatccacggcctccttgatttcccgagctttctcgccttcccctccttttctccataaaaggcctttgcattgcgaatttgattgacgggggttgaaccgttcttggccaccgcgcatcctgtttctctttctttcgtgtcggcaaatatgaagagcagaagtcactgcgaatcagtctaaattcccatcctttcggtctgccctaggcagcttatccttgtctagatgttcaagtatccaagccctgcatattttaccctgcaagcatctattctctcgggtccctgctctgcctttgaaatgttgggcctgcgtaatgtaagggatcaacgtacctttgcaatttatgcacataaagtaagacattgtccctagagtaattaatgcatgtcaatctcttggctgtggcccatgcggggaggggctattgtctcattgtgtctagatataatccgatcaggatatcacttctagcaacattcgaatgattatgttcgaaggatacagacaaagagccaaaacaggcaaggatatcgtactgactacgtatataaagcccgtgagagaaattttctttcatctgccttttctaatattctttgtcttaatcctcaacgaaacctcaaaactcgaagagaatgtccatggttttgttcatgtcgagttttagccttgcatctgtttcggcgttcattcgttccttttatttactttttgacgagaatctttgaatttaaagaggcatataatatagtaaggcatgaagagaacatgaaaatacggtcctaatatcatattgacaatagatcagattaccaaagtcttacgcttatttgctttttttgtttaaaggaaccagaggaaggttccttccctattaccacccaagtacctatagcttcctcgattgtagatagcagtcttaacttcctacacggcttggtctaattctcaataaactagctatatcttcaccagctgagtcgtcagtgtttctctccactatggatcaaaaacctttgacagctttccccatatccttcctgaagacaatacatctcatcggttctctctcctggctgcaagtgctctacgcagtctcctacatcgtacgcccgttttggaacacacggcgcgagtttccaccattcaacagagccatcgatcgcacagaaaaaagcattatcaacaccatactcggcactattgcactctcagcccatagttctgaaatagaaacagagcgccagtggtacctttcatcgggaaatggcaccctgaacaacatgcgcaccacctcccaatccatccccagcttgctagtcacctcaccatggccaccggatgaacatcaagactcggattcctcattagagcaagaaagtcccacctcacagccgagcaccgaatctccccgagaaaacttccctatctatgaaaccgtgcgcaagctccgatctagcacacggggcagcatttcaaagctcgccaactcggcaaaatccatcttccgacagcctctgaccgttctgccacggaatatgggcgacccctccccggatgaggaacgggccgagcgagacctgattccagtcccagtacacactgcgcagcctcacttcgtccagaacatggctttccccgcgcccatgtcggcctctgcacatatcacggatcactttagtgaccctggtccgtcgactggaagcaaggtgcaacagccagtctcgtttggggcgaccattgatgcggcagctgattctgatacggtgcagatgaatcgagcgcgcaagtatcaatctgtcgagagctatccgggaaagttccctgttagtgatacattggattatagctcgcttgctagcgcttatgctgttagagggagggggactacctccgttcgacctttctcggactactagggctttttttttggtgatgggcattctcattggcattgcgggtttcggagatgatatctccgtgacgattttggctgtttgactgaaggcttcgaattaggtcttttgatttgctttttaggacatgacatcagagtcagtcctgtacttgggtttctgctattcattatattcattaccaaagatcaggtctgtcaatcttgtcattcaatggaatttctatattttcgcagaattggctagttaccttcttttatagttaggtgagggtcgaaggatctgcttaatctggcgctttgcgattcaaactttcaccaaaacaaacaactcggtactgtaagtacgccgtccacggggactcatgcagtagccctgtcaattcctcgtcaatccaaggaagaaattgtcagttctttcattgtctgtatacttcccaccgcctttgtttccgctcgaaacaaagaagttcaatctttttatagaattagttgtcaacatttctcttagctactagccaatataaaggatagtatgtatttatcctaaatacctctagaacctactttggagtcctttctcttgcataatgtcacatatatcaacatccaactgcctcctgttctgccggacatatacacgtggacctctttcgacgcggacgcgccatccttatcgataagcgcgttactgccactatcttttcagctggcttttcaaaaaaaatcccccctctggccatggcaaccatggacgaggtaccataccggccacatgtgccccttcaatgggagctggctcgacagacagaaatcttcctcgaagatagcctatgtatgttcgcttttcccgtgttttgacgcgtgcgcaaaaaaacctcaaagagtcgctgctaatgatctccttctcaaccagggccgcaagcatatagccttctctttaatgtccttgcatcgggcactatcgcatcaacaaaagcagtgattccactgcctcggcatctggccgtcgcagctacgatgctggtgcacccaagaacaacaacgcgcgccgagacggagtacgaaaaggaagcatccaaagcagctttgcgatttctccgattgacgaattctcttgttggtcccacggatgcaaaatttaatctcgctttcggattcaaccagtttgcatctttgcgacctggtaggcggcgtgcggaaagcccgatgctcgctgagaatgacaatcctgataccaggcctctgaatacgaaattcgaccaggcttcttcggtgtggaactgcgcagaggacttctggcacgctgtcggttgggcatttaattgttcggtgcttcatccggcccggtgggagcgctggcagatatggctccagttcatgtgcaacgtactagaagatgattggaaagagtgcgaaaacaaggcggtacctgatgaccttagcatatttcgggaaagcctgatcttccgttatatctcctcaaactccacagctggacggaaccgcagaatcatgcgggcaatctttaccaatgccaaatcgaatcctggcgagttcaaggaggtattcaaagatgaattaagaatgcccgtccctaaacaagactcgcataatttaaagaagagagcaggtgatatcgacctcgacaagggtcactatggcgattaccagaacaatttcgacgatgatttcgaagctgatcaaagctcaacctcggtattagaatcgactgctaagccacgacgtagcaaacgaacccgacgaggaatgcgcaacgcagaggacgacgccacaaaccccattaagatggccaaagcaagccaatcatcctcccgcgaaagcaacaatctctccctactaggcggctacacttccatcggcctccgccaacaactcctcagcatcctctccaacgtttcggaaaaactgccgcgggacttcatgcccctagacgacctctacaacatgttcgtcgagaacattcgcgacctttcgctcccgatcttccaacacttcatcagcccctccaacccacacctcctacccgaagcgcactccacactctgcgaactcctcctcttcgtcatccgcgaaagctccgccccaagctctgatgccaagtaccttacccaggacaagctggagaaatgcttcctcccctatgcggcggctaccccaaccgtggagaacaatgccaagatctccattctgctcgaggcgctgatgacacacctgcacgagggaaagatgatctctgtgaccccatcgctgacggaagctgtcaactctgggattgcgcgtcgtgagaaggctagtcttgatcgggactcgcttgaatgggcttacttgaaggaaagtgggtttaggatgaagtttatggtcgagcatatcttaccgtgaagcgtttctgtaggatcggggatgaccggcgttgtggtaatgatgttaatggtggtaatgatacttaatgatcggatctcggggcgtttttcaagcgtttgaaatgccatttgattcttttcgggtttataattgttatgatatatacttagagaaatgcagattcttcctacttactgtgaaaggactatcctacgaatgtgtgatcaactgtgaaacgtatttttaaaatgtgtttaatatagagccttgagtataaattgctatctacaagcacatcgcgtcaaaaataaagaacaaaaaaccaagggcctgaagcgggaatcacacgcagataacacaataatccaccaacgcagaaatatgataataagtcttctgttccaatgatgatatccgcccacagaggcaggaggaaatgagcttagaagccgaagtagaaggagagaatagtaagagaatagaaggggcaaggagtcaaagaaacaagaaccctaggttgaataggtaggttcaaggagctgtcaacccaagtcaacgcttattgcggcggccggggcccaatgatctggcgcctagcaccaccaataccaaggccaagaccgccacggttctggttatcaccacccatatagccatactgatgaacatcccaggtctggcccggtccagagccctgggtgccatcttgggcgccacgctcggccacagccgccacttgtttctggttctccgcccactcttcctgacgcgcgcgttcgcgctccatctctcgttctagaagagacttggatgcccagccgccggccttggtcttctgctgtgcagctacgcggcggctattctcggcgtcgacttcggaggtcgtggtatagtcttggaaccggtgggtagctggcgctggggacgcgggtgctggattcgaggcgaggaagctatccacgcggctttcgtggcctcggttggcgttgtatgctactgggtctgggaggggccggggcgacttgggaaggtccctaggagggagcgtcggggttgtagagaaagacgatggctttggcactgggaggggacgagggactgggggtggtgcttgctcctggatgggttcgtgctcctctgcctcggaagcagcaggcatatcctgcgtgttctgccactccgtccggagaaggcgccgttcttgttcgagagaagagagatcatagctaggcttggcgggcacgggacgacgaggctgaggctgaggctgatcgccagtctttccaggctggacttcctgccgctcagtttcgtactggcgctctcggtcctttgccagctgtagctcgcgctcgagctctttgatgcggcggctttgggccgtttcctcgaccggccttgctacggcatcactaacctgggagttggaagcctggtactggctcaggaactgaccattgaggcggttatcattcaggcttcgtctctgttggcgttccttctcaaaccgggcctcggcttccttttcttccgccatacgtcgctgctcttctgcttcccattggcgcttctcttcgtcccagcgcttcttctctgcttccaccttgagacgttcttgctcccttgtacgggcagtctcttcttcccatcggcgctcctcttctgcctgggcacgagcctcctcttctgcaacctgtcgctggtgagcccgatctgcctcttccttctctgcgttctgttgacggatgcgttcgtcctcttcgcgcctgcgcttctctttctctgcaaggcttggtacagcaggtccgggagtggtaatctgtctgcgagcaccaaatgcaatcccttgattcccttggctagctcccccaatgtagccatactggtgaatgttccaagccggcgtggtaccctgctcatctccctttttggcccaagtactgtatgacccggagggtttcgcagggctgcctgtttgagagggaagggtccccccgacaatgctagaggagcgagcggatcggggtgtatatgctccgttgcttgaagaccccgtcgcatttgggctgattacaccgcgcttactctgcgggccaaccgttcggggaaacttgttgggcgcaagggtattggcccgccgactgaacgctgcgatacactggagaacctgcgccggatcctttgcttcgtatagatcaactgtcagaaagacatcgtgcggggggaggttgagcggtggcagttggcatgcgcgcaagaaatgcgaaatattctccatctgtacaaatggcgctgacaacttcttatacttcacgcctggtgacacagcgaggtttactagtcttgtgattaaggagttagccaggggtctagacccactacttgagaaacacagatacaacttacttgcaaagagcaatgccatctttcaggccttcgagtaagtctggcgatgccagtttctcatgcagcatttcctcaatccagtcgcgcacttccgcggctgcctgcggggtatagcgggataagcgcatattgcgcaagtccttgtccaacgaagtcactgaagccatgatgagtgcggaatactcgatgctcgagtttgttgaagtgtaggtagactgttgttgccacttggtatgtatccctttgccggtgcctgaccggccctaatggtggcggcgattgggtagcagaaggaaggcgttccgtgatacaattggtaatgacaagatgaagagaatatttcaattactagaagcgcagatgtttccagtaaagtcgtagaaatgaaaaaaagaaagagaagaaggtctagggatagagagaagatcgaacgggtggaatgttcgggctgtgtttatcccccgatgacgttccttgacatgccgtgcgcctagatcttttttttcgcctccttctattcttcacgctcaacgatggttaacagcttgtggttcaaatggaagaagcttcgcctgccctggcgaaaatccttcttggtcggtcagtatctgctttttgtttttctcgtgatgtctcagtaccgctaaccgtctctcaggtgaggatctcgctggaaataccttctgggagttcaaggatgtgttgaatgcatctcggttccgacgcattgttcgattcgatcccaaaactcatttgagtgatgttcaagtgacacgtaagtcccgtcggaagatgcaggctcgggcttggaccacattccctattccggggtaaagggaagtgagactattgaatcataactaacatgttgtttcaacacagcgcaatggtaccaatggttgcgacatgtccgagaacaccccccgagcatccaggagcagcaacaagatcttgtccgacaggcgcaaatcaaacaactcgctcgactcgccgatgaacgctgggccagcaaaccctccgtcctcgataagcccaagaatcatcaacaaccaccaacgacccagatcaacgaggcgaatttgaatcagcccgctaacgctgctcccgcacaaacagtaccggcttcaaccacatccgaacccgtaccgaagacacaaaaggtggagaacccatggggcaaggccaacaaaaccaacccaggtgaggagtggcaacctgaagcgtggactcctagttccaagcggtgaagatgatatcggcttattccggtcatctctccacaatgctatataagcttgactttcagagatgtgtgccggatggtagagaaggctgtcgccgtgccctgttggtcaatttacagcagaaacacatttcaaggaacccgggtcatagatggcattgaggctatctcatgctgaagagtctttgaactctacccgcgctcctttttgtgtgaggatagcggctattgtgcactatgttcaaccttacaggtcataacaggtgtggcccgacctgtctcgggggtttcaaaagaatgagagccatgtatattggcacttgtatattatgctattatagttttctattatctagcgttttccactcaatcttaccatccactaaaggtattctcgagccctgcaattatactctatatcctagtaaatctagtggctaggcacagtgttttttttatattttcaattttcctactctaacatataaatcaccccctttttggtttttgtatttttccatgctgcagcgcaagtgtcataaaaagacctcaccccccttttttgtatttttcaattgtcgcacttgttgcagcataggcacatctcaagcttgtaagaaaagcaaggatactgcacccttttttttgtcgttttatgtttttttccgtcgctttcatatcatgagcagtattccagctcaataaaagaagtcattgcgaaaatcatagctcagatgattccaaaaaggaatggagcatagcaggagggtgtcaaagtccagattccggaaagattggttagatcgtaacgtcaacaagaagatagaaaggtcaatggtcgatttagatgtagaccatgctgttctggcatgcgcttgccatggccaaggtagtacctctaaacttatcctcgttctggacttgcatgttgttgtcatggtagtaagccaagagatactttcgagcacgatcgcagaacttatcagccaggaaggcaggagtgctgtaactaatcgagcgagtagcgcgacccatcagataacagatattgtgggtaagttcttgcaacacatcagctggcttgcggtcagtattgaccttggggttggtgaagatctcatcgtggatgacaatgtagtgagccggacgagcggaaccctgaagaggagcctgggcttgtagatagaagtcccagtagataggacgggtaactccgcggtcaacaacacatccgttaatggggttagatgtccgatcttgatccttagcattggtagggtagaagcgcacgttatgacgctttccacagacaatgatggtaatgttgggcatggctccacggtataccgctttagcagcagcttgaaccttggggagttcctctgtaaggaccatggggaactgaccgtcgctgacaccgtcgcggtacacgagaatattctggggtaggttgccgttgttggtcttttgccacaagctcaaccgggtaagcatcatctccttgaggaattcaatgtgctcctgacggcgtgtctgggctcgaacctcaccgggccattgtcccatgttgtgatcggtggatgcaacgatggcagcaacactagggaagatttcggggtctgtgcttgacggatgagtgacatccaagccaacgaccatggtgttcttcgctgcactgataaagcgtgcgtttgccggctgcaggagttgattgcatcctcccatcttgaggttgaccttcatcgcgttgttactcaagtactgctcattggcacctctgaacttctcggatagcatgcagtgcgtaaggacgccagtcttaagatctccggcatacttgacgtaatcgaagattttgccttcagtggtaggaagcagaacaactaggaaggggaattctctcatgagcttcttgaatgcgtccttgatcatatcgcgattttgtctgtcatccgggccgagaaggactgagagatacggcttagaaggcggaggaagcgtcaggccatggtcacgcaatttcctgtagaaagcgtccatctcgatctcgggattcttcaaggcatcctcttttccgcgctttcgaagccaaagacagctccatttgctgatgctggcgccacgggcaaatttggtgccgatcaaattccacgagccgtttcgagggttggtagtcttcttgccgccatagagtagattgggaggattcaaaatccgtgcaggtacagtgatcatctccctgccgggcttgatccccactgtcttggtatgtcctccggagattcccattatgtccaatccctcagtcataatagagtcatagttctgaggaggccgccggcaactgaacttgatcatgttctgtcgttggacagcggacggctctggcttgaagcattgcccggggaggacttcgcaaacctctgcaggaaggtaaaccggacgttcacgggttccaacattcaccaccggcatatccttgctgtatttgagtgtcctgttgtaggctgttatttcctgttagcacaacgcaaaataccgagtgataggcagcaaacatactcttgaagaagtattcggtaatgctcatgtattttcccttcttgtcatctcccatccagaacttcacattgtccgcactagatgagaggttttcaatctgaggagggttggggccagggcgtccatcccgaggagtagcagttccgaggatcgttctgacagggtattccattaccccagctccgttctctcgacgctccagatgcaaggcatagactttcacacccttcaggtaccgattcaaaagctctcggtccgttccgtggacttgggcaaaagcaacaagtagctcagacagcatacccgaacggaagaatgcactatggctgacattcaaattaaggaagattcgtccagcaccaacacggacactcgagtagtaaccacgaacggcttcggcgccagccttcatgtccattgactgcttgcgcctgtccatccggaagaacttgttgcgtcccttgccgacgatggaaatgccggtatctttgtaaggatgagcactcatgaggatattcagtactcggagacagggcgcttcattctcaagttcctctcggtggttgacgttctcaaggcacgccatcatctcagccggggaataagagctgtcgagggtcaaagtggcttcccaggggccggtgtaggctttcgatttcccacctccatgtccgcctccgttgcccatggaacaagtgaatggctctctgccttcggggagtagctcggtagtaacaatctcagtagcgccatcggtggcaacgccaattcctttgttgaatagagggtacttgcggaacatactatcgagaacgaacttttgctgtgctttcttcgcctcgggcttgaccttgagccggtaagagtagaatctaacgttcggcttgaactccatggggaagaagttggcgcgaagcacaatcgcacgaccttgagtgccgtagccaggacgtcgagccaaagagttggactctgggcgaacctttgctgactccgtaacgtacttgtcctccaaggcctggaccctggtgctgggagcttcaattgggtccgacaacattctgtgcgcatgttagatataaatctttcctaatgtagaacaaataaacttacccagagggggcttcggacccgccacgtccaccaccgccgcgaccaccaccacggtcactgccacggccccgatcaccgctgtaaccgcggtcaccaccaccccggcctcgggagccaccacgatcaccaccgccacggccgcctcgaatgggcaaatcgtagccacgaccagacattttgacgagtgtctagttagagaaaagaggtagttgtaaaaaagaaatgattatgtgagaccgtgaactttgcacgtgtctgagaaagtaggataagcgacgaaaaggactcgaaacccctagttatttgggtatttcggagaggaaacgaggacagaaggaaggacggaagagtaggtttcaggaaaggacaagcgtaatcttgtccaccgcaggtttcctttttcagaaaaaaaaaagaaaaaaaggtcaaatgcaggttcgttgctctatcgttatgcattagtaacgatgaaaaattggtttgttgatatgcataaagatattgatgtaaactcagaaccatgcagcagagtaatgggtgatgtagggcatgcaatagcatgaggcaagtcgcccaacccacaaccaagagcgagccaatgggaatggaaatgcagtgacaatggagatagtgaggcaatgaagatgtaggactagatatcggatatgaagaactggatgatggtgcaagggaaaaagttcaagggaagacaaatggaaatcaaggtagaccaggaagaaacaaatgaacagcagcaaataagaatatcagaacaaatgctaggaggtatgcctgatctcaatgaagaggcaattggaagagagatttgttgcaaattagggcttggggcaaaggattcacagcaatcaaggggcgacaagcattaccatcaaagcagcaagtgagagatgcaagttaggggaagtgaattgcaagtgaagaattgataaagattaaagtaaggtaaatgcatatgcagtgaggaatacagagaggactggctcagtttgccaatatcagaggtactggcatgcgattgaagggtgtagagacatattagggcaaagaaacgaacaatgtactcaccaaagctgtttgtatgggtcgtggggaggaagaagaaggaagaggaagaaattgctggggatggtatatatagtcggccaccgcagtatgcgcgcgctggtagacttcaagaccatgaggcatgtaacgcgtgttggtggacttcaacttcaatatcatagagtatgcatgaaacgcgcgttagtagacctcaagctggttgatatgtaggacttagggcaaggacttgctacatggaacttataatatgagcctgatagtatggggtaggacttatagtatcagtatagaaggcttggaataaaaagcaagttagccatgaaaatccacagtacttagtactgatagtactagggcaacaaagaagaaatgaagctcaccagtccgacaaagaaagacacatactttaaagctcctggagctcaaaagaaaaaagataaaggaatacagcaaaagctaggtagtcacaaagtattatgaaattaggtatccacagaagagtctaactagatattatgataatctaacattttagggctgtaaacacccggcctaggcctgaaagcaaaaccacaaactccaaaagcaaaccagatattcccaatgatatagccctaaaacaccggctaaaaagaacagagacaaaaaaaaagcagaaggaaaacaaaatcaaaatcaaaaaggcttaacagaaaacagcttcgagggcttcgacgtcgccgccagcgctgcgaacagctctcaatgcggcttcgctcagcttgcgacgtctatcgcgggcttcttgctcgcggcgagccttggtcttggaactgccagagggagcaactccggtcaggatcttcttgctgtcgtcggcagtaaagttgacgaacgatacgctgacagacttgtttgagcctcgggatgaggagctaggggccttggcgggcttgggggtattcatgctctggctggagagcttgcggctgtgtgtgcggcggtgggtgggcttggaaatggatccatggtgggtgtccctgggtgatgtgccggtcttgggagagagagatgatgatgaacgggagatttcgtggacttgggaggaggtgtaggaggtgtcgaatttttgagaggcggtagggagcatattagatgagaatgagtggtcggccgacatgtcatatgagggattgaattgaatcattagtcctccttgcatgatgtcattttggcttccaacgttttgcatgtggcggacaggtgtgggagatgcgaggtaagcggcctgctgttgagcgacccgagaaggcatgggggaccaccattgagattcctggccttggaggtctggggtgaaaggtagggatgaggcatggagagaatcggattgccaagaggagagagaatggaggtcggatgagtgagatgaagagaagatatcatcagcggaagggctggagttggtcaaagcggaagagcttgggtgagcaatgtagtgctgttgctgccgcgctgacattgcgatactcggcgactgcattggaactgacggagactggtgatatagccttgcgtcgtactgaggaggcatctctgccgagtctctagactggttcatgatttgttcggtaggcatgttctcatgctgaatgagggcatccgatggaggaggcgacagtggcaaacggtcttcggaattgtgaaggctgaagttctgaagtcgctgggcccaagcctcaggataggccatccttgatttggataggttggaagagcgcattaagctaggggagaaactttgcttgcgcagatgagagcgacgctcattcgggctgcggtggcggatagtcttgggagtgatgagagcactctgggtaggcttccgtctaggggtagctggaggggtagaaggcgagatagacagagcgtgtgttgctgtaggacgagagggaacttcaaagtggttcaggttgacatctgagatggcagaaggatggacggtgtcatggaaagcaaaatgatcggcagcaggtccgtcatactgcagggaccactcattactccagggttgcggtgattgatggcatttgggagtggagacagtgggtgcaagatcgccacagtcgtttgacagcgagtcaagcggaaagagctggtcaaactcggacaacgccgagtcttttccatcagcggcactagtttccatgttgacgtattggttgaacaagtcattgaacgaatggtcgtattgttgggcgaacatcttgccggatttccgtttgcggcgacaaagtaaaagtacggggcaaaagtgtagtcagcgactcaatacccgaaaggctttgatgtgattggataacaaagatatagtctcggaataagcttgggagagtttggggatagttcgggggaatcgacccggatatccgaggagtgcaaaggatgcaaaaagagggagaagcgtttgaatgtttggatgtttgatagtttgtcaatcaaagaaaacactgcagacgatgcaaagaaagcaaagcaaacaaacagatgcaagccctatttgaatagctgccagggacaccagcctcggaatttatggacacattcctcgtccatctttagagcacttggaatgtgctatagagggcccggttggctcctggtcggccccaccaacctccctcaagaatgcttcaaggctctcaaaccaatcgtagttgctggaaatacaatggctggccgagcagttaatctccgtcagatctaaaagacgcttcgtgtcggatagccacccacgggaatgcaaccctccttcactaagccagaagcagtggaacagccatcaaatgggttagtgaagcaggcctttaggggacttaggcatgttggccgataccttaattaaagatcgacatgactcgtacagagtacagagtaagagaacggccgtggaaatgggtcggaacgctctccgaaccgttcaggattgtccaaggaaccaggaccatacagcttggacagaatgatgatcacctatccaaggttggtacttgcagtgtaagcgtcatgatacctgatatcccatcatcaaccgcccgaaaagactcgagttgggtgacagtatgatcggccgtgcactgtggctgcatatttcttgcatttgcttcattatgattagccaattgatcaaatgggggtcggtaatgttgtcgattggtcaatgtcctgttagtgatagacggtccggaatgtgggttggaacgtagaggctgggcggaatgtcacctcccaccccgaacaatgcacagaagagttcttagtattcgagaagaatatgttttcctggaaagctccagtatgaatgttcccctgcttagaagttcggcgaaccttgacctgcaggagatcgccgtcccgggcccttattcgggagtgtttgcttcaaccccatgttctatatttggactgcatgaagatgatcaagataaggccatgtttgaatgcagtagaaaacaagcctttcctccgcatgagataaggatctgatacctcctttccccttcggtataatcgcgccatttagtggtcaaagtgtagtgtccttcaatcggtggggttttaggtggtttttggtacaaatctcagatgatattgattagccaattgtctttgggcgatttttaaatccgctaatagtctgtaatgcgttggtggcgtgtcaatgtgtatgtttcttcctttggcatcgatgtcgtgtttgagttgattcaggcatcacaaacaaagcagccaatattcaaacgaataaagatctaggcgagactgcaggattgacagacatatattgaaagagttaatatattgaaagagttaaaggacaagattcggtatagttgcagttcaaacccaaatcggccaatcagcagttgtgcctgtttcgtcaaacgcagtctaaggcgctaatgcagaatgcagactgccggcctgaataaaattaaaaatagagacagaaaaaaggggtaggtgtcaacaaaccaacgcgtcggcgagaagaagtggtctgcgaatatacgcgatgtgcgatctgggattgagatcgattgccctaacgatgcggcaatagcgggtggccccgttcaacaccatttgtatgcaatcagcaaggacagacttgataataagtcacagatacccctattaaacatgcagttattcaatatcatatgcctaggagtaaatagtaggaaatattgtgaaaatcctgagtgcgacactaaaaaaagcaaacccggctgagaggtactgtgtactccgcattccggtactcccgaggctattcaaaggccgatatagtgtactcagtactgtcacgagtagcatttggaggtataaccgagacaaacgatcaaatgcattcgaatgacctagaaataagttgcatatgactgcatattgtatcgaaagagcccaaacaaaatccccaaggtccagtggacggaccaagttcgggctgagtcagatgacgagaaattggggcgactgccctttcgattccagaaggaactctcctctctctttctcttccttttccccaggccactcgaaacagtgcccttggactattaattctctattactgttactgctactgcttctttgcagtgttccctcgcactttcctctgtactttgtgtcgttgccttgactccagagtcgacgtgactcaacccggatttatttgcccctccgtcacaccccgcgaaacgtgggacactcaactcttctctactttcatctccgctcttacctgccctcttgtcgcgtccttgtgcgataagcctttgtttttgcgacattgcgacccttgctgctctcgcgacattccaacgccgcttgcattgcgtcacgcgaacacaaattctctcctagccactttctaataccctacatgcatctcaacaaaacctgtggcctttttgttattcgtgaccgatatcaacttatttcgaatcattcaagcaaccagtctcgacactgttgcgcgcacccaaccggcaaggaagcacccttctacattcaatcataaagtgtatcaaaaaatcatgtctttcaacatttgtgctgggaacaagttcccctaaacttttacacgattcccgtgtgccttcactatgcacttttcaccgtgctttgcaggctttcgatgcccttgctattctcttgattcactctcgacttactgatatcaccttttcaacctcatttcttccacaaatccggtctctcctatagaggagtgctcggtcaaagcccagaatttcccaattcttgatatcttgggcaattcgccaaatcaccaaagaaagcgtcccactgaaagcatggacaacccaattactgagcaaatgagcaactcggccctccatcgaggctcgtgggaatctgtctcgtctgccttctcccacctcgagatgtctttttcccacgatagctgctatggctcggatgaagtttcggtcacatcgaatagttgcaccccaactcaatcaggtgtatcgactgctactaccaaaccgactttgcgtcctttcttgaaatcgatcctcaaaaactcaaccgttgcctttgactctgatgaagagtccggctcggagtttgatgaagagtccggctcggagtcgggctatagctcagacggaattgattcggagtatgatgcattatctgatgaatccgacgaagaagatgacgatgatgattcggacttctcggtctgggatgaaacaaacggggatgtccctgagacgcatgaggatcacaccgagtcgtttgacgatgccttcatttcctttgaggagaattctgtgcgctttgacccgcaggtagagtacattgacagcgtggaagtatcggatgacgaaggtcctgatcaccaaatgacttgccatgaaatgatgatgcttgctcgggactcgaaaggcacccaaacacttctagatcaactcgataaaatggacatcgccgagtccagaaaagaacattgtcatcaagagtttggtcgcaaatctaccaaccaaccagaagagttttcccgcgatgccgtggacttggactgcagtctctttgtcgcttacatgaatggtatccgcgggattgttacaccgaagtacaagacttaccttcgagttcaggttgaccatattcgcttgggcaaggataccgaattcgtggatacagagggtgcgccttcgttgtatctcgacctagtctccaaccatgtcactggaaccttctgcaacctcctcgctgaggacgagctcaacgagttgatcagactccgcacagtagagcaagccggcaaacaaaacgatacaagctcgtcgaccctaggcttggatcaccaccaagtcctcttaaacaaaattgaaaaattcctgctggacaggttggcgagtggtcgggttgaaattggccctgatgaactgagcttcttcgctggcggcattgcgcacgaactcggtaccaaaacgttgcctgcacaggtctaagatctgcttgcacatcggcaaacaaataacacgactttacgattatgaccaaacatttctttcggattcgccgactatcagggcacacaatgggacggctctttagccaggaaaagcatttaaacttctcataagttgctttcggaataggttttgacagtggtcatgtattttcccgaactagcacttgatatgtattcaaaaaaaaacaatttcaaaacttcagatgttcgcaagttgatgattcaggtgtagctaaacctgtttttctgcctccgtgggactccgaccttgagtgcctagccaatcattctcattcactcctttccgacctaaaccccacctacaacatccgagtctcggacaaggcgagacggaaagaaaatgccagtcttgactcttaaatagtcgaagtataccatactgtaacaactgttcaacctcccttacccattttgagtcctagatactcaacgttttaaggttacactcactgtacatatacctatgtgttcttaaacatatgcacctattgctccgtgcttgcttaatattcacagtagtatgacgaagtatatatatcgtaccaccagctccgagttggatgtttcaaaagtctctaaatacatacccaatacacttatatttctaaccaaaatcaatatcagtatcacattacctaaagcccttttacacaacatggctaaacctataaatttcatacctatgcaggggttaaggaaaaaagatgctgtatcatttgtaccatttatgtgagaataccataaaggaacagtacctattgatctacagtaatactgtagttaaagattaattataacacgccattattctcctagaaatctcctagaaaatctcctgatacttctctaacacacctgatacgccaaccaagcccctttatcactagctggcaaagggcctagacactagtgggcgttccggcccggggaatttctatttttcttccctgcaggggagggatgggctgatgtatttttggacgaggcgtgtgctgtgcggagtaactgttttgtgaagaacgttgaagtattttgtatgtagatcatgggtatgcggagtacgtaactacggcttaacaagatcggttactactaaaccaccctatacaacatacaacataggagacttcaattttttatttttttttcactctcgttctcgttctctgtttctagtctccattccttcagaggtgggactttacatatgcaacggacttcatgcagacaagttatccacctagccccgtcaaaatcagcggggattatcagttgtttcatttgagggtgcaaacttggcagttagatgatgagtgacaggaaataatggatcagacggtatccagctccaccggttataagttcgatattgtatgtacggagtatgtagtcgggagttagtgctatgacgggtataacgcatatcttcatgcagtgaagatcacccggattggcatacgatagtacggagtataatccgtaaccttggatctatctcccaataacgctgctttcggaagaaatgtgaccgtttcgaagtgacatatcagataaacccaaaggtcaagttatcgactcgccgtttttaattaaatccgtcgatcacaacggcgtcgagcacagacagcacggggagaaacccaaaacccactgaggcgtagcatacggagtagctacggagtagggggctttcatttagacttttagaacgatgcggtgaatatgatctggccgaaatagactttgggctcctattctctctgtcattttttgcgtctgtcgtaccttgctgtcgatcattgacgatctcgagttcccttattcggatgatattctgctgtacggagtataatgtggttgatgatcgagcaaaatgaccatctgagtagcagtgcatacaatgtgctctgtataccgctgtgtcattctcgttatagatctcaagcatgaagagcctcacggagaaatacaccgatgaagaagaaatcgcggagatattcggccaaaaatccatcaatcgaataatcggttttctgctaacggcaggatcctgtggggccctgaaggattgtcaggaagggtttgacagctagggaacagagtggagtgtctttctttccgtatggggtacgtagactctaaaaatggagtttggggagcacggagaagggccagtcgctaggtgaaccaagttggttgatgacgattacgagtcatagtcatatccataactatggggttatcgggagtggaaatacagacacggctgagtaaaggcttattcgaatcagtgagaatgacaatattccaacgccggctaccacgtggtttgttaggcgatacggtgactcctgcgtgagattggatgaagctggtgcgtagacgatgttgtgggatgttgatgctgtacaagataagctgcttctagggctgaggggtggtacagaccagggaatatgcataaggataggatctgatatatcgctggatctatggagcagtgctgcaaggcgcgagaacaagttgtgcgctgtacatttattctttgctttttctgggattccggtagttggaaactcctgatcttctgcaggattaaggtgttatccgacaatgtgcattgttatcgttagttcctgctagtgcgcactacgttggagctgctggcaatagtcgcgaccctattgttcactgtcacataggcccacctgacccgagtcctgtcatctccgatgtatgaggtgggtaacggagtactccgcacattccgcaccttgtacacttgtattatccgttttcagctaactacaatatacaatatattaatagatggggctctcagcctctcattcgcttagacaggttcttcaaagaaattgattggaatggtcattccacgggtgagattcggcaaatgaagtgattggaggagccagagttgacagttgaatggttcagatcaggcactgcgcgtgacatagggggcctacaaggggaccgttgctgattgggggaatcgatataagtcgggataattgtctcagataggaaagcattccaaggcctggcaatataaaatgtatacgtaaagtttctagaaactgggaccgggtccccgtagcatggcatttgtgcaccacaggcttatcctcgtgtacccctgggagctgtggaacggctgaggaacgtgtggaaaaggatgttatgcgctaacaactgcactaccgaatgtgccccgtagtactccgtactagcgggtcatacctgaatgaggtacattgagatatcagatatcagaattgcaaataattccgggtccataccttgagagtgcatgcaatatatgtcctccgcgcatacagacaaacttcctttgaggaataatgacggaggccaaaaatcaataattataccagaaaggaaaggcgccaaagactaactgtgtccccgcccgaatccatgggacggcatgcaatgattggctgtccacgaccaatggggtctgaaacgaggtgcgagcggggcactttagcgtgctgatcgctgggacattgtcctgtgtttttttgcctgcgataggctttttctccgaatcagggggaagacggtcttgaatagctcaataagataggaattggaccgtacagtaactgtctaaacctgtatctatgtgagtaagttacatttcagagaaatagcctaattaaggtatggggtatacaaaacaaactgtaatcaggtaagattgtatgatgaatgtaagattgtaagatttgtatacacttgcaggtgctccataaatcatgccgtagtcgaccccgaatattcccaggtccccactgactcggatggaataattactcctgactctctttctcctggcctctacgggtcattctgtctcatcctctcgcttccttccactttccccatgccaatgcggtatgagcactgatcgcatctttgattcaaacgggtaagttggaaatccaccttccattgtcacgggggcccgtccagacgacgttgcgcatgcagtcgtacaagcccccgattccactcgagtcagatttcacccgcagaatcgtgtcagactgaccgtcctgggagtacaggatgatttgaaatttcgatttctacccagcgccttccggtccaaatcgaggtccgcgaaggaacacagaaaaagaggcaaacaaagctgtcaagtcgagccctcgacctaaatatacccggggtacacaatgcaatccttcaaaacacccgacttcttggagactggggccgtgtcccgttcgcgcagccccagtgtcgtttctagcgattcgcaattttctcgagtcaacctcatgtccccaccgtccgtgacgcccgctccagcattcatctcgccctctgcggcttcggatatcgtctctgccgaccaggagttcaacgccgctgattttgtcgccgaggatgaggaaaccggggccggcgccaccgcgctggtgaccccggccgcgctatcgctcctgaacggattcctcgataatctcttgtttaatatcctcgcttcgtccaagtcgacccagctcgcatgcattcgacccgccatggctgatgtgttgaagccccgcctggccaaggaagttgtagcctcggctgaagaagagttgggcgagtatatgggcggagcggacgatgagcagacggaattccgcggtggccaggagcccggcggcgattttgatctagtacgctcatggaagttaacccgtctacgatgcatggtctacacacggctgggcgatatggaagaggatgacgaagatgagtttattgcgcaggatagcctgggagagaccgatggagcaccccgcagattcagcagtcacgtcgacaatattacacccgcagcttctattttccttacctcgatcatcgaatacattggcgagcgggcactcgtcattgccggcgagacatcgcggtctcgtttgtcggcacaactcaacaatggcggtcctgagtttggatctggacatgagcggaaaagaatcgatcgacttgtggtggaagatctcgatatggagaagttggccctgaatgcaaccctgggtcgtctgtggcgcacgtggaggcagcgccgacgcggaaccaatctttctcgaacactatcccgtgaatcattccgcccacgtggatactcgctggcaaacagccgaaagagcagcattgtgaccatcgaggagccaataacgcccaaggagcctctccctgtggcgatgcccccgcctttggaccccgccactgtgcccttgccaacgagccattacgatgttcaagagatcgaggtccctggctatactggcgatctagatggggaggtacagaccatggaggccgttatcgctcacaaggtgcgaccgcgcagtctgatggtgttttcatcgccctcgcttgtcccaaaatctccaggttcagcaagcatctcgcccgtgagtacgtcagctattgaaattggcaatccaatccgtcatgtccgcacgaggtctctacctggtggggcacctacacccgacttcactgaggaggagccggagtggccgacagaccacccgtcacccactgcatcggagaaaaagcaactcgagactatgtacgaggatgatgaatcagcagaatatgtggatgcagctgaaaccagccctggcattgctatcacgacagaagaggaacaggaagagacaccacttatggaacctgtagaagaagcttccgaaattgcgagaatgtcgatcttgcatgaagaagaggaggagacacatcctgtcggggagacggttgcatcattgcacgctatcgcacaagctgaagacgctatgactgatcaatccaatagtcctcgcgtctccctcgtatccttgggtgatcggcggaatcagaaagacctagaagtgattgagggcactgggttatgcgaaaagcctaaattgacttcgacgatacaccgaccaaaacgacaaccctccaaggacgccagtctactgaatgcgaagtcgatctctgaacaaactagcgactctgaactgcaagccgttgcggagagtcagccttcagcgcaaggggttaagaccacgccggctccacccgcaccccccgtcgaggctatcacatctcgtaccgatcacgatgggacccctccgactcgaccatcagaggaatacaccgaaacagcaaaatctctttcccccgatatcatttgctcgacttctggttcaggtaattcgcagctatcgaaaacccgccccagaccttctccgttggaggtcacaaccaacaatcgaagctcctcttcctctacggttgaacgagccgctgttcaacgcatgtctcggccatcgtcatctatcaccactaaaacccgccggtctgggagcttcggcagtgctcgcgagaaaacgcgtccagtgactgccggctccactacctcgcaggtgtctagcaggtttaagggtatcatgaatcggccacagggtgaatctgggccgccccgcatgcgcagctcgtctgaaactagtcgcgcatctggcgggagcgtggactctgtagaagaacttgccgatttggacaagttgatcaacagcgacgagactatccattacactctcactccccgaagtgtgagggagatgacattccccaaacaacccaatcgttcagttcctcggtcagagacggcaggcgtctccgacctggctaatttcttaaataccactccgccaccaggggaagataagcaccgtcctcaaacctcggtttcctcaagagcaaccgaagagatgtctccaatttcccacaccagatccattgattcgcccaagcacatcccgcttaccacgcgcttgaccaacatgtcatcaacatcgaggtctagcaagattgggccggcgcgggatgcgcgagtcccaccctcggactcgacacgcgactttgcggatttcatgaaatcgactggtcctgctggtggggtaaacgagttcaaaccctctatctccgctgagggcacgcggtctgttcgtcctccatccgccgtctcttctgcctcccgtggaaaccgacctaagcttcaagctcggtctgctgagacgaaaggatctccgacctcggacctcattgacttcattcgcgagggacctcctatgcctgcaggtgctcaccggattcctcggacagttgcgcctttcaacgcccttgattcggatgatcttcagatggagaccaccacatccagttctttcgtcagcactgggaatgaatctacacccaataaatcattgacatctcttggttcgcggtccggcttgctggattcaaatcagaacaaggccccagcgtcgacaagcgccatggacttcgacgagcctcagccgcctgttcggaagcaacgccgtgctccagatccgtacgccattgacgacgatgacgatgacgcgtatctagaagagcttctggaacaggaacagaaccccaagcccaagcgcgaggaggagagcctgatggatttcctactcaacgctcctcctcccccttcctccgaacaacccccacagccatttgccgttcgtgctcctgcatcaaataatctctccggtgcatcgggcatgaaggcccgcttgctccgcacttctcataactccttgcgcacccaaaccgcccccaccaaggtccattctgactacgctaccaaggtcggtcagcagcgcaacaatggcaccctgccttctctctcaaatcgcccgaccaacaccggtgatttggcggatttcctccgaaataccggacctcctccagcccccgcgcgagcttcatcaacaccaatgggcgctaagacgaaggacggtagcttctcccgtttcttctcgcgtcgaaagaaggtcgaggcttagggttgaaatcctgacgacattctcgactgtcttgctttgctgagcgttccaatccatctaatgatctacatatcatgtccatcgctttgatattccttgtttgtgcgacaacactgcgatctttgtcattcctttcctctttatcttattcacatagagtcgtgtcctcgtttccttgctgttcgggtggctttttattatcttctttgcgcttgtgtgcgccattttattctctaccttctgcatgggacggaacaattaattcggacttcgggttttctattttgtccctttgtgggacgtcgctttgattgttttcgtggatttcgagataccatgcctatgtacctacactggggctatttttgtaccctgacattcagaaaccatttcattattctgtgaacattataactccaatacaagtaactactagacttacataaataaacaattagacctagcaataactatttgctgcgtgaaaagaatccctcggtcgaagtatagatcgtagaccgtaacaccggaacaaagttaatcccacactccccttaccaggtgtcatcaacagcagcaagcatccgtgtttacaaccgccaattccacgccgcaacaatgggcacctcaccaattacgctgagggccatcttcagcttcctttttgtcttcgtccagcttgccagcgcgctaaaattcgacctgatcgccacctccggcagcggcaagaacgagcgatgcattcgcaacttcgtctctaaggaccagctggtcgttgtcactgccatcgttggcggtacgaagggtgacggccagagggtcaacattcatgtatgtggacttatgtctggatgtggatgggaatccgtcctgcgtctgccgggactcggagaccaaaccgccgaattgcagattgcagattgtggatcgcgactaattcttccttttctgtgtatagatcaaggacgctatgggcaatgactacggtcgccctaaggatgtcgtcggagagacacgtcagcttttcacttcgcccgcggacacggctttcgacgtctgcttcgagaaccagcttgtcggccacagtaagtggtagtccctttgcacaacaccaacaatgcaccgaggaaaaggcggagttaaagagattgtcatgctaaaacaacattaccccatcagacaccatccagaacccctcccgccccgtcgaactcgacgtcgacattggcgccgacgcccgcgactggaacagcattcagtcgcaggagaagctcaagcccgttgaaacagacctacgccgcatcgaggagatggtcgccgatatcgtgactgagatggagtacctgcgtgcgcgtgagcagcgtctgcgtgataccaatgagagcaccaacgagcgcgtgaagtggttcgctttcggaactatgggcatgcttatcgggcttggtgcttggcaggttgtttacctgagagcttacttcaggtatgtgaaattgtggttgtggtggaaggtggagttggttactgactatttggttcttgtagatctaagcatcttatctagatttactagtccgtggaatggttgcatctttgatggttctttttttggtttttgcagcggttgcattgcaaatccttttgctctaacgtcgagtggcattctgttcaacagtcatgatctcaatgatataaaatgtacaccatgctttctgcagcctggcgctaataatattctctgtttatcgcttgtgttgtcctgggattgtggttagctatactttacagggtgcatcttcgaccttgtagtattacctgagtatttatggattaattatatagttctctatgtcggtaaagcactgcttaaatagtatgtgccttggtagatagccctggagggagcttccccagggcttctggtgcatgtgaggtcagtgtatacatctagattgacatctggtaaagggatcccgaggccgatgaagttaaaatatcagacaggccaagacgtcgaacaaatagtgtctcaattctaaagcccaaaaatagacataaagaactgcaccgtgtcgacaagtgtgtaattcacggcctctcagtggcctgccaggtcaatgtttagcattgcaaacagaacaaacaccgggcattgcaggagcttttcggttgcccgggcttattacgccggatgatgtcaaggccaagcatcactcatccctagaggaaaaaaaaagctcccaactccctctctataggacactttacaacaaaatgtccgccccacgtatactccatcgcctcgcgcgaccagtgccatcatccctaagcacaatcacaagactgaacggccaccgccaattcggcgcgacagctctccgtctcaaagatggcaacgacgaagctgcctctggggtaaaggcgcaccgcgccaaccagaccgacaaggtcccgaaccaattcgtgcccaacacaacctccactatgacaaaggacttccccagtgtcggcgagaagcccccgccaccggagatgctgaactcagccgaccccaactacagaccgtccgatccgtacccgggacggattgagcatttcaccggtggtcgtcaagacgatggagcgcgcaagcccgagcttgaagttggtgagatggagggtattacgtttaagattgagcctctgaagagggttggggaagatcttgtcacgaagagggcacgtctgctatgttcgtacccgtttccatgcatgctttgcacctcagtcccaaaccaaagccgaggacctggtgcatctatgtcaagaatgattgaagctaaccaattccactccagaccaaagccgcaagcgtggaatcctcgagtcggacctgctcctctcgactttcgcagatgtctacctgggcaagatggactacgatcagcttgtcgcgtatgacaacttcctcgatgagaacgactgggacatctactactgggccacgcaggacccgcctgaggatatctcacccgacgctcctaaggaggataccatcaccgagacttggaaggagaccggtgccaagagcggtgaatgggcgcagactattggcgctttcagagctgcttaccggcctattccgtcacgctggcaggactctgaggttctcacgctgctcagagagcatgttcgcgataagagcgctcttggctttgagaaggccaagaataagaagattggcggtggtaatggcttggggagaatgcctgatgttcaggtgttccactcgtaagggcctgtgaagagattgaactggatagtttgtcgatttcaaaactgtactatagttgtcatggccatgtttaattgtccataggaggcgtgtattaagaatgttgtatacctgatgatactgggatcaataggtgtaggattcacaataaggatagaaaataaagcgattgttaaattcgaataagacagacttagatgtaaatcaataattatccatctcaatatacatcgtagtccgtatagatccaggtcatgtgacccttcgcttagtattagggctccacggaaccacacaaggagagcagcgaagcggcttagggcttgggcgggcacgtctgcctcccatctcgattttacctccccccccagagtcaacgacaatctccgcccatccctctctctccttcattgtctcattcccatcatggctgagcagctggttcttcgcggcacccttgagggccacaatggctgggttacttccctcgccacctccctggagaagtaagagtgacctatcccgatcgggggattgaatttttgaagggacaaaattctgacttgaatgtttgataatagccccaacatgctgctgtccgcttcccgcgacaagaccctgatcatctggaacctcacccgtgatgagcaggcctacggttaccccaagcgcagcctcgagggtcactcgcacatcgtctctgactgtgtacgtttttcttctcccgaatgaaccacacccacaagccattggatgcgacacatggatttggatggcgcatttcggaaaaaaaaaagatggaatggttttggctgaccgatggtcttgtctgcgttataggtgatctcctccgatggtgcctacgctctgtccgcttcgtgggataagtctctccgtctctgggagctgtccaccggtaacaccacccgcactttcgtcggccacaccaacgatgttctgtccgtctcgttctccgccgacaaccgtcagatcgtctccggttcccgtgatcgctccatcaagttgtggaacacccttggtgactgcaagttcaccatcaccgagaagggccacaccgagtgggtttcctgcgttcgcttcagccccaacccccagaaccccgtcattgtctccgctggctgggacaagctcgtcaaggtacgctatcgattccgaattttcctacacaatttcctccccaccttgctttgcccgcgtgatgtttgcataaacgtatttgctacttcagagcccttcggggccatgagacaatttttcacccaatttgcctgatgggcacagcaacaatttttttgtttttttaaatcgaacgagagaaggattggaaaattttttccttgacacttgacattctttttttgagggtatcgacgctaacattcgatccgcgtctaggtttgggagctcgcttcttgccgtctccagaccgaccacatcggtcacaccggatacatcaacactgtcactatctcccccgacggatccctctgcgcctccggtggcaaggacggtaccaccatgctctgggatcttaacgagtccaagcacctctactccctctccgctggcgatgagatccacgctctcgtcttctcccccaaccgctactggctgtgcgctgccaccagcagctccatcaccatcttcgacctcgagaagaagagcaaggttgatgagctcaagcccgagttcgttgagaagggcaagaagagccgtgaccccgagtgcatcagcttggcctggtccgctgacggccagaccctgttcgccggttacaccgacaacaagatccgtgcctggggtgttatgtcgcgcgcatagatttgagttgttgtatcggagcttgaggagcctctttttgatctattgacaagggaattgaaaaaaagttcaaaagatacggccagaagcgcattggtttgggatgtatgagccacgagcaatgaagcacttctcgccgggacgaagtcgtccccggcctggaggttttctgacatgtctagcctactcgatccacatttaaaatgtatggaatcttgtgcaagacctgtgatgttctaataccagttaaggcatcaaaatgtttcctatttttctttattaaaaatctcttgtaaatcgtaccgtatggttatgttatatatctgtctcatttatcctcccacttgtgttctgaatcctgatgtagggcaatgctacgatagctgtcggatgtctaaattatatgtagaatggtttggagatttctatttccaacaatagtcataatgtacatttgaacagagggccctcacgtatctacccattatttctttccaagtctcttcaaagcctccttggccatcatacttccttcctcatatttaatcccatcagccaacgccttagcctcagtataccgctgcttagcgacttgtggcttcttctgtagctcagccaactccccaaggttatacgtcgcaaccacacatgtgatgtcacactcctcgtcacgtatcgggggtttaatgtgagccgcaacctcaatagccttctccgcccacttctgggcagcctcaacagtctgctccgctgtaacaggttcctgcggctgggccctggcaggcttttgaacctggccgactagagcggtagcaacatcgttcagcagcaccacctgtttgcaagatatagaagttccttcagcggcgcggatcaaatccaacgagcgcatatacagcggcatggctagctcatatcgctccttggcggtataggtagcggcaagctcggccagcgccgtcgctatctcagtaaggttcagccaggcctcgccgtctgccccctcgccactgctagcgctaccaacaggaaggcccagcatctggcggcggcgcatttccttcagacagatctccacagcagcgacctgcgcggcctcggctttcttctcgtcttgtatatactcgctggaataaagctcgccaagcttcatcgcaatgccgacgactttcttgagcgctttgtctcgctgacgagcctcgtactgcgccagtgcttgcagatcttcctggctttcttgaatcacctcgttgttaacctggacaatgggcgcggtcttctggacctgtcccttcgcttgcttcaccttctcggccgcggcagcagcgttacctgctgtgacttgctccacccagaccagagcctcgttcttcgttcgctccagcacatcaatcgccggcttcacaagtccggccttctccagcatcatagcaacctgaagcttgattccaaggatctcatctgagaacgggtgtatgcccatctcgaatgctgtgtgcagtgcctctctgtacgacttcatcgccttggctgggttgaggtcgatctcggtgtaatagatagccgtgcggagagcgtcggccaccggcggcgggaatttgtggtactgcggtccgacacgtgtcaattctacgtaggagatgtaggcaaagatgaaggctccgccgacaaccgagaagattgctagtggcatgaggacggggttcttgcgccagattcctctagatgcttcgcggtatttgcggctgattttctgcaggatcgtgaggtgccgtgtgccggagatgtaggggcttgcgagtggtttgccattgttgatgcggggttggagggttggtcgggtggtgctgttgatgtatattgagcgggcgaggctcttagattgtggttgtagaagttttgcggcaggcgcgctcgtgcgccgtgatgctgctcggaacattggggatgtgtgagtgggtattcggttgagatttcaagttttgattttgattgagcgggtgattgtctgatacaacctgggggattgacgaggatggagaggagatggaaaaggtatatggtgacgagagcccgccctcgattttctggtggtccaagctccgctccgccagatgacgtcgcccgctggagtatgcactcatctttccgcccattccgcctggaaaatgaactgttctcattcagctttaattgtgagacatcgctcttggatcagtctagtggtctaccctgataatgtgtgggcgatacgctttgggtgtggtaagctacggttcctacatctagactgtcctccagctgacgatcccaagcgcttggcgtatatccaacaacagctgcaggagcatggtatgcaagtggatgaagcaccggatgacgattcagtaagagagacatacaactttgcaccgggcaacttcggcgctgtctatcgcgctgagatcaccgataaaaagagccaacaagatgttgatagcgcgcaccaaaaccatgatttagaaaagggaaaagatgacgcgagctcggatgctaagtcagtagacaacacgattatcaaacacaagctccagagcatgaaatggggtctcattccattctggacgaagcgccagccagattacggatccatgatgcgcacgatcaactgtcgcgatgactcgctgatcgatgattcggggatatggactaccatgaaacgacgaaaaagatgcattgtcgtctgccagggcttttacgagtggctgaagaaggggcctgggggaaaggaaaaggttccacactttatccggcgcaaagacggagagctgatgtgctttgctggattatgggactgtgtttcctacgagggcatgccttctttctgatataaaacatcaagccgggctgacgattgcacaggttccgacgaaaagctctacacgtacacggtgatcacaacctcttctaattcctacttgaaattcctgcatgaccgtatgcccgtcattctggactctgggagtgaggcgatgaacaaatggctagacccccgccaaaagacctggtcaaaggagctccagtcaattctcaagccttacgagggtgaactagagtgctatcctgtccccaaagaggttggaaaagttggaaataattccccgaactttattgttcctgtcgacagcaaggaaaacaagagcaatattgcgaacttctttgccaacgcgaaaacgaaggagagtccaaacccctcttcaaaggagccgttgccgaaagtggagatggttaaggacgagcgccctactaagaattcagaatggagcgaggacaatgccccaataccggtgccagctgtcaaaagggagcatagtccagaggctcctgatgccgcgcaggaaagtaagaagcaaaaggtcgattcagatacaactaggccatcgccgcaaaagaagaagttgcgcagtgctacgcataatagccctatgaaaaagtcaagtgggacgaaggcagcagatgggtcgcagcgaattaccaatttcttcaagaaataatacacgcaatgaagcaagtgaaccttgcttctattattcggtcagccatgcttctcgctaatgtatatatatatttttttgtcaaatcaaagacgagaacaacatggtcgatttatatttaccagctgacatgtatctaatagattgagtgagctcagctccatgattgagttgaaaacagttcaatgcaagagaattgtcacgaacttttgagttcagcagcaaccgaatgcaagttgaaaagaaaaaaagagtagaccttcgagaggacttctgagtgaggatatatattacataggattccgtgggcgatgtacccgattttttgagatatcacttcgcaagctctcgtagcttctggaccagcttttctctgaggaaagaactcaatccgaaactatatcaaccaatcaacattggttactcatagataaaacatccaagaaagggggtacttacattccatctcgagtcaggatacgataggtacctgctaagtatcagcttggcctgttgagcctcatatcggaaaacataccactcggctggtaattgccattgtctccaacgaactgcccattggcatccacctcaaggctaccgaacatatcctctggcctgaatggaattagtatgaaataaaatgtacttgttgaaacacaagcaagcttaccaagcaatccgcccatagtcaggcggccgtctgttatcagaaatatgaatccaaccaccacgtccaccagagcctgcaccaccttgaccactagcaccactggtcgagtcggctccacgacgtctcccgcgctgaccggttagtaacacgccgcctgagttcaggttcgctccggccacagacaccatgacctgcgcctgcgacttggcatcggggtcttcatgcgcatattctgagcacacttcttgtacaatattcaggaatttggggttttccttgaaggtgtctgttgtcggtggcagttgagtcgcgagtccgatagctaggtctgggttgactggctcggagggtaataatgacaagatgtgggttccacttgctggtccagttgggaacacatactatgaataatttagcttcaaggagcgctttggaaggtgtaacaagcacatactatgtacggagacccttccaatgtcgatacacaacggaatcgagtccatttgggaagaacccgggcctgtcgtccaaacgctctggctgcaaacattgagatccaaatatagtaaggcagtgggtaactgagtaatggccttgcaggtagcaggtcggatataatcaaattcaagagagctggatcatagcttaatggaaatggcaggcggtttcgaaggcggtgaatataagccggaattaaagtggacctgaccagaaatacctaaagtagtctagcggggattgttgatatcagaaagttaaaaaaacattatagcctcataccaaagcgatggcagttgtgaaacaagtcggccggaaataagagaagccgttcctgctctcatgatcacgttaccattcaattaagcgagcccatgtcgttgtttgtctcatttgtgaatagtggc
